(19) United States
(12) Patent Application Publication
(10) Pub. No.: US 2022/0290241 A1
(43) Pub. Date: Sep. 15, 2022

(54) PREDICTING EXTRAINTESTINAL MANIFESTATIONS OF INFLAMMATORY BOWEL DISEASE

(71) Applicant: Cedars-Sinai Medical Center, Los Angeles, CA (US)

(72) Inventors: Dermot MCGOVERN, Los Angeles, CA (US); Michelle KHROM, Northridge, CA (US); Talin HARITUNIANS, Los Angeles, CA (US)

(21) Appl. No.: 17/825,580

(22) Filed: May 26, 2022

Related U.S. Application Data
(63) Continuation of application No. PCT/US2020/062404, filed on Nov. 25, 2020.
(60) Provisional application No. 62/941,209, filed on Nov. 27, 2019.

(51) Int. Cl. C12Q 1/6883; A61K 45/06; A61P 37/06; A61K 31/573; C07K 16/24; C07K 16/28

(52) U.S. Cl. CPC C12Q 1/6883; A61K 45/06; A61P 37/06; A61K 31/573; C07K 16/241; C07K 16/2866; A61K 2039/505

(57) ABSTRACT

Provided are methods, systems, and kits for identifying a patient who has or has a likelihood of developing an extra-intestinal manifestation of inflammatory bowel disease.

### CROSS-REFERENCE

[0001] This application is a continuation of International Application No. PCT/US2020/062404 filed Nov. 25, 2020, which claims the benefit of U.S. Patent Application No. 62/941,209, filed Nov. 27, 2019, each of which is hereby incorporated by reference in its entirety.

### STATEMENT AS TO FEDERALLY SPONSORED RESEARCH

[0002] This invention was made with government support under Grant Nos. U01 DK062413 and P01 DK046763 awarded by the National Institutes of Health (NIH) and National Institute of Diabetes and Digestive Kidney Diseases (HIDDK). The government has certain rights in the invention.

### SEQUENCE LISTING

[0003] The instant application contains a Sequence Listing which has been submitted electronically in ASCII format and is hereby incorporated by reference in its entirety. Said ASCII copy, created on May 24, 2022, is named 56884-768_301_SL.txt and is 1,359,037 bytes in size.

### BACKGROUND

[0004] Inflammatory disease, fibrostenotic disease, and fibrotic disease pose a significant health burden worldwide due to the vast number of individuals affected, heterogeneous disease pathogenesis, and varied clinical manifestations. One such disease is inflammatory bowel disease (IBD), which has two common forms, Crohn's disease (CD) and ulcerative colitis (UC). IBD comprises chronic, relapsing inflammatory disorders of the gastrointestinal tract. Incidences of IBD are prevalent, affecting nearly three million individuals in the United States alone.

[0005] Extraintestinal manifestations (EIMs) of inflammatory bowel disease (IBD) may occur in both ulcerative colitis and Crohn's disease. EIMs may develop prior to the onset of colonic symptoms or after the onset of colonic symptoms. They commonly affect tissues including the skin, joints, eyes, or other organs. Some EIMs are associated with active intestinal inflammation and some EIMs occur independent of intestinal inflammation. Examples of EIMs include ankylosing spondylitis, sacroiliitis, erythema nodosum, pyoderma gangrenosum, psoriasis, a manifestation in the eye, and primary sclerosing cholangitis.

### SUMMARY

[0006] Provided herein are genotypes associated with and/or predictive of the likelihood that a patient has or will develop an extra-intestinal manifestation (EIM) of inflammatory bowel disease (IBD). In certain embodiments, genotypes described herein are also associated with IBD, such as Crohn's disease (CD). Further provided are methods for predicting the likelihood that a patient has or will develop an EIM based on the genotype of patient. Additional methods include treating a patient for IBD based on the patient's genotype. The patient may be diagnosed with, or suspected of having, IBD, such as CD. As an example treatment method, patients exhibiting a genotype associated with a particular EIM may be treated with an IBD therapeutic that may also prevent or treat the EIM. As another example, patients exhibiting a genotype associated with a particular EIM may be treated with a therapeutic that will reduce the likelihood of developing the EIM.

[0007] Non-limiting practical applications of the associations between the genotypes described herein and incidences of clinical and subclinical phenotypes in certain populations of individuals are provided herein. For example, some genotypes of the present disclosure can be used to predict a risk that a subject will develop ankylosing spondylitis, sacroiliitis, erythema nodosum, pyoderma gangrenosum, psoriasis, a manifestation in the eye, or primary sclerosing cholangitis, or a combination thereof. The genotypes are also useful to predict whether a patient diagnosed with some form of an inflammatory, fibrotic or fibrostenotic disease will develop a severe form of the disease, such as a subclinical phenotype thereof.

[0008] Aspects disclosed herein provide a method for treating a subject having an inflammatory bowel disease, the method comprising administering to the subject a therapeutic agent, provided the subject has been determined to have a genotype comprising one or more single nucleotide polymorphisms selected from the group comprising rs6905036, rs2844510, rs2516514, and rs17030062. In some embodiments, the subject has been determined to be at risk for developing ankylosing spondylitis and/or sacroiliitis.

[0009] Aspects disclosed herein provide a method for evaluating whether a subject having an inflammatory bowel disease will develop an extra-intestinal manifestation (EIM), the method comprising determining whether the subject has a genotype comprising one or more single nucleotide polymorphisms selected from the group comprising rs6905036, rs2844510, rs2516514, and rs17030062. In some embodiments, the EIM comprises ankylosing spondylitis and/or sacroiliitis. In some embodiments, the method comprises administering to the subject a therapeutic agent. In some embodiments, the therapeutic agent comprises an anti-TL1A antibody, anti-CD30L antibody, glucocorticosteroid, anti-TNF therapy, anti-a4-b7 therapy, anti-IL12p40 therapy, JAK inhibitor, thalidomide, or cyclophosphamide, or a combination thereof. In some embodiments, the therapeutic agent comprises etanercept, adalimumab, infliximab, cyclobenzaprine, a steroid, secukinumab, methotrexate, leflunomide, hydroxychloroquine, or sulfasalazine, or a combination thereof.

[0010] Aspects disclosed herein provide a method for treating a subject having an inflammatory bowel disease, the method comprising administering to the subject a therapeutic agent, provided the subject has been determined to have a genotype comprising one or more single nucleotide polymorphisms selected from the group comprising rs9276456, rs2858884, rs2858319, rs6917611, rs6930571, rs389419, rs76558762, rs7956721, rs887864, and rs9276424. In some embodiments, the subject has been determined to be at risk for developing primary sclerosing cholangitis. Aspects disclosed herein provide a method for evaluating whether a subject having an inflammatory bowel disease will develop an extra-intestinal manifestation (EIM), the method comprising determining whether the subject has a genotype comprising one or more single nucleotide polymorphisms selected from the group comprising rs9276456, rs2858884, rs2858319, rs6917611, rs6930571, rs389419, rs76558762, rs7956721, rs887864, and rs9276424. In some embodiments, the EIM comprises primary sclerosing cholangitis. In some embodiments, the method comprises administering to the subject a therapeutic agent. In some embodiments, the therapeutic agent comprises an anti-TL1A antibody, anti-CD30L antibody, glucocorticosteroid, anti-TNF therapy, anti-a4-b7 therapy, anti-IL12p40 therapy, JAK inhibitor, thalidomide, or cyclophosphamide, or a combination thereof. In some embodiments, the therapeutic agent comprises ursodeoxycholic acid (UDCA), antipruritic, cholestyramine, antibiotic, vitamin A, vitamin D, vitamin E, or vitamin K, or a combination thereof.

[0011] Aspects disclosed herein provide a method for treating a subject having an inflammatory bowel disease, the method comprising administering to the subject a therapeutic agent, provided the subject has been determined to have a genotype comprising one or more single nucleotide polymorphisms selected from the group comprising rs10056322, rs6461986, and rs13421864. In some embodiments, the subject has been determined to be at risk for developing arthritis. Aspects disclosed herein provide a method for evaluating whether a subject having an inflammatory bowel disease will develop an extra-intestinal manifestation (EIM), the method comprising determining whether the subject has a genotype comprising one or more single nucleotide polymorphisms selected from the group comprising rs10056322, rs6461986, and rs13421864. In some embodiments, the EIM comprises arthritis. In some embodiments, the arthritis is peripheral arthritis. In some embodiments, the method comprises administering to the subject a therapeutic agent. In some embodiments, the therapeutic agent comprises an anti-TL1A antibody, anti-CD30L antibody, glucocorticosteroid, anti-TNF therapy, anti-a4-b7 therapy, anti-IL12p40 therapy, JAK inhibitor, thalidomide, or cyclophosphamide, or a combination thereof. In some embodiments, the therapeutic agent comprises methotrexate, leflunomide, hydroxychloroquine, sulfasalazine, nonsteroidal anti-inflammatory drug (NSAID), TNF inhibitor, etanercept, infliximab, belimumab, rituximab, anakinra, tocilizumab, canakinumab, secukinumab, ustekinumab, ixekizumab, sarilumab, tofacitinib, abatacept, corticosteroid, prednisone, or cortisone, or a combination thereof.

[0012] Aspects disclosed herein provide a method for treating a subject having an inflammatory bowel disease, the method comprising administering to the subject a therapeutic agent, provided the subject has been determined to have a genotype comprising one or more single nucleotide polymorphisms selected from the group comprising rs4349859, rs4418214, rs3819299, rs2373969, rs4151651, and rs9366775. In some embodiments, the subject has been determined to be at risk for developing an extra-intestinal manifestation (EIM) of the eye. Aspects disclosed herein provide a method for evaluating whether a subject having an inflammatory bowel disease will develop an extra-intestinal manifestation (EIM), the method comprising determining whether the subject has a genotype comprising one or more single nucleotide polymorphisms selected from the group comprising rs4349859, rs4418214, rs3819299, rs2373969, rs4151651, and rs9366775. In some embodiments, the EIM comprises uveitis, iritis, episcleritis, scleritis, or undiagnosed ocular inflammation, or a combination thereof. In some embodiments, the method comprises administering to the subject a therapeutic agent. In some embodiments, the therapeutic agent comprises an anti-TL1A antibody, anti-CD30L antibody, glucocorticosteroid, anti-TNF therapy, anti-a4-b7 therapy, anti-IL12p40 therapy, JAK inhibitor, thalidomide, or cyclophosphamide, or a combination thereof. In some embodiments, the therapeutic agent comprises a steroid, methotrexate, mycophenolate, sulfasalazine, azathioprine, cyclosporine, adalimumab, infliximab, daclizumab, abatacept, or rituximab, or a combination thereof.

[0013] Aspects disclosed herein provide a method for treating a subject having an inflammatory bowel disease, the method comprising administering to the subject a therapeutic agent, provided the subject has been determined to have a genotype comprising one or more single nucleotide polymorphisms selected from the group comprising rs80079682, rs115994059, rs7297515, rs13166683, rs62376929, rs9305694, rs139009610, rs28732100, rs12199223, rs1265181, rs13417109, rs17026757, and rs117670930. In some embodiments, the subject has been determined to be at risk for developing erythema nodosum, pyoderma gangrenosum, or psoriasis, or a combination thereof. Aspects disclosed herein provide a method for evaluating whether a subject having an inflammatory bowel disease will develop an extra-intestinal manifestation (EIM), the method comprising determining whether the subject has a genotype comprising one or more single nucleotide polymorphisms selected from the group comprising rs80079682, rs115994059, rs7297515, rs13166683, rs62376929, rs9305694, rs139009610, rs28732100, rs12199223, rs1265181, rs13417109, rs17026757, and rs117670930. In some embodiments, the EIM comprises erythema nodosum, pyoderma gangrenosum, or psoriasis, or a combination thereof. In some embodiments, the method comprises administering to the subject a therapeutic agent. In some embodiments, the therapeutic agent comprises an anti-TL1A antibody, anti-CD30L antibody, glucocorticosteroid, anti-TNF therapy, anti-a4-b7 therapy, anti-IL12p40 therapy, JAK inhibitor, thalidomide, or cyclophosphamide, or a combination thereof. In some embodiments, the therapeutic agent comprises an anti-inflammatory drug, cortisone, colchicine, potassium iodine, steroid, hydroxychloroquine, cyclosporin A, or thalidomide, or a combination thereof. In some embodiments, the therapeutic agent comprises a corticosteroid, a ciclosporin, infliximab, canakinumab, clobetasol, mupirocin, gentamicin, tacrolimus, mycophenolate mofetil, or thalidomide, or a combination thereof. In some embodiments, the therapeutic agent comprises a steroid, retinoid, methotrexate, adalimumab, brodalumab, certolizumab pegol, etanercept, guselkumab, infliximab, ixekizumab, risankizumab-rzaa, secukinumab, tildrakizumab, ustekinumab, or apremilast, or a combination thereof.

[0014] Aspects disclosed herein provide a method for treating a subject having an inflammatory bowel disease, the method comprising administering to the subject a therapeutic agent, provided the subject has been determined to have a genotype comprising one or more single nucleotide polymorphisms selected from the group comprising rs4349859, rs4463302, rs4418214, rs2069835, rs2516514, rs17030062, rs9305694, rs139009610, rs28732100, rs12199223, rs1265181, rs13417109, rs17026757, rs117670930, rs115994059, rs7297515, rs13166683, rs62376929, rs4418214, rs3819299, rs2373969, rs4151651, rs9366775, rs2858884, rs2858319, rs6917611, rs6930571, rs389419, rs76558762, rs7956721, rs887864, and rs9276424. In some embodiments, the subject has been determined to be at risk for developing an extra-intestinal manifestation (EIM). Aspects disclosed herein provide a method for evaluating whether a subject having an inflammatory bowel disease will develop an extra-intestinal manifestation (EIM), the method comprising determining whether the subject has a genotype comprising one or more single nucleotide polymorphisms selected from the group comprising rs4349859, rs4463302, rs4418214, rs2069835, rs2516514, rs17030062, rs9305694, rs139009610, rs28732100, rs12199223, rs1265181, rs13417109, rs17026757, rs117670930, rs115994059, rs7297515, rs13166683, rs62376929, rs4418214, rs3819299, rs2373969, rs4151651, rs9366775, rs2858884, rs2858319, rs6917611, rs6930571, rs389419, rs76558762, rs7956721, rs887864, and rs9276424. In some embodiments, the EIM comprises ankylosing spondylitis, sacroiliitis, erythema nodosum, pyoderma gangrenosum, psoriasis, a manifestation in the eye, or primary sclerosing cholangitis, or a combination thereof. In some embodiments, the method comprises administering to the subject a therapeutic agent. In some embodiments, the therapeutic agent comprises an anti-TL1A antibody, anti-CD30L antibody, glucocorticosteroid, anti-TNF therapy, anti-a4-b7 therapy, anti-IL12p40 therapy, JAK inhibitor, thalidomide, or cyclophosphamide, or a combination thereof. In some embodiments, the therapeutic agent comprises an anti-inflammatory drug, cortisone, colchicine, potassium iodine, steroid, hydroxychloroquine, cyclosporin A, thalidomide, or a combination thereof. In some embodiments, the therapeutic agent comprises a corticosteroid, ciclosporin, infliximab, canakinumab, clobetasol, mupirocin, gentamicin, tacrolimus, mycophenolate mofetil, or thalidomide, or a combination thereof. In some embodiments, the therapeutic agent comprises a steroid, retinoid, methotrexate, adalimumab, brodalumab, certolizumab pegol, etanercept, guselkumab, infliximab, ixekizumab, risankizumab-rzaa, secukinumab, tildrakizumab, ustekinumab, or apremilast, or a combination thereof. In some embodiments, the therapeutic agent comprises a steroid, methotrexate, mycophenolate, sulfasalazine, azathioprine, cyclosporine, adalimumab, infliximab, daclizumab, abatacept, or rituximab, or a combination thereof. In some embodiments, the therapeutic agent comprises ursodeoxycholic acid (UDCA), antipruritic, cholestyramine, antibiotic, vitamin A, vitamin D, vitamin E, or vitamin K, or a combination thereof. In some embodiments, the therapeutic agent comprises etanercept, adalimumab, infliximab, cyclobenzaprine, steroid, secukinumab, methotrexate, leflunomide, hydroxychloroquine, or sulfasalazine, or a combination thereof.

[0015] Aspects disclosed herein provide a method for treating a subject having an inflammatory bowel disease, the method comprising administering to the subject a therapeutic agent, provided the subject has been determined to have a genotype comprising one or more single nucleotide polymorphisms selected from the group comprising rs61199332, rs7857730, rs497871, rs2516514, rs17030062, rs9305694, rs139009610, rs28732100, rs12199223, rs1265181, rs13417109, rs17026757, rs117670930, rs115994059, rs7297515, rs13166683, rs62376929, rs4418214, rs3819299, rs2373969, rs4151651, rs9366775, rs2858884, rs2858319, rs6917611, rs6930571, rs389419, rs76558762, rs7956721, rs887864, rs9276424, rs10056322, rs6461986, rs13421864, rs80079682, rs6905036, rs4349859, rs2844510, rs9276456, rs4463302, rs4418214, and rs2069835. In some embodiments, the subject has been determined to be at risk for developing an extra-intestinal manifestation (EIM).

[0016] Aspects disclosed herein provide a method for evaluating whether a subject having an inflammatory bowel disease will develop an extra-intestinal manifestation (EIM), the method comprising determining whether the subject has a genotype comprising one or more single nucleotide polymorphisms selected from the group comprising rs61199332, rs7857730, rs497871, rs2516514, rs17030062, rs9305694, rs139009610, rs28732100, rs12199223, rs1265181, rs13417109, rs17026757, rs117670930, rs115994059, rs7297515, rs13166683, rs62376929, rs4418214, rs3819299, rs2373969, rs4151651, rs9366775, rs2858884, rs2858319, rs6917611, rs6930571, rs389419, rs76558762, rs7956721, rs887864, rs9276424, rs10056322, rs6461986, rs13421864, rs80079682, rs6905036, rs4349859, rs2844510, rs9276456, rs4463302, rs4418214, and rs2069835. In some embodiments, the therapeutic agent comprises an anti-TL1A antibody, an anti-CD30L antibody, glucocorticosteroid, anti-TNF therapy, anti-a4-b7 therapy, anti-IL12p40 therapy, JAK inhibitor, thalidomide, or cyclophosphamide or a combination thereof. In some embodiments, the therapeutic agent comprises an anti-inflammatory drug, cortisone, colchicine, potassium iodine, steroid, hydroxychloroquine, cyclosporin A, thalidomide, or a combination thereof. In some embodiments, the therapeutic agent comprises a corticosteroid, ciclosporin, infliximab, canakinumab, clobetasol, mupirocin, gentamicin, tacrolimus, mycophenolate mofetil, or thalidomide, or a combination thereof. In some embodiments, the therapeutic agent comprises a steroid, retinoid, methotrexate, adalimumab, brodalumab, certolizumab pegol, guselkumab, infliximab, ixekizumab, risankizumab-rzaa, secukinumab, tildrakizumab, ustekinumab, or apremilast, or a combination thereof. In some embodiments, the therapeutic agent comprises a steroid, methotrexate, mycophenolate, sulfasalazine, azathioprine, cyclosporine, adalimumab, infliximab, daclizumab, abatacept, or rituximab, or a combination thereof. In some embodiments, the therapeutic agent comprises ursodeoxycholic acid (UDCA), antipruritic, cholestyramine, antibiotic, vitamin A, vitamin D, vitamin E, or vitamin K, or a combination thereof. In some embodiments, the therapeutic agent comprises methotrexate, leflunomide, hydroxychloroquine, sulfasalazine, a NSAID, TNF inhibitor, etanercept, infliximab, belimumab, rituximab, anakinra, tocilizumab, canakinumab, secukinumab, ustekinumab, ixekizumab sarilumab, tofacitinib, abatacept, corticosteroid, prednisone, cortisone, or a combination thereof. In some embodiments, the therapeutic agent comprises etanercept, adalimumab, infliximab, cyclobenzaprine, steroid, secukinumab, methotrexate, leflunomide hydroxychloroquine, or sulfasalazine, or a combination thereof. In some embodiments, the EIM comprises ankylosing spondylitis, sacroiliitis, erythema nodosum, pyoderma gangrenosum, psoriasis, a manifestation in the eye, primary sclerosing cholangitis, or peripheral arthritis, or a combination thereof. In some embodiments, the EIM comprises ankylosing spondylitis and sacroiliitis. In some embodiments, the EIM comprises erythema nodosum, pyoderma gangrenosum, and/or psoriasis. In some embodiments, the EIM comprises the manifestation in the eye. In some embodiments, the manifestation in the eye comprises uveitis, iritis, episcleritis, scleritis, or undiagnosed ocular inflammation, or a combination thereof. In some embodiments, the EIM comprises primary sclerosing cholangitis. In some embodiments, the EIM comprises peripheral arthritis. In some embodiments, the arthritis comprises large joint arthritis, small joint arthritis, extracolonic arthritis, Crohn's disease/ulcerative colitis non-specific joint inflammation, or IBD-associated arthralgia complication, or a combination thereof. In some embodiments, the EIM comprises ankylosing spondylitis, sacroiliitis, erythema nodosum, pyoderma gangrenosum, psoriasis, a manifestation in the eye, or primary sclerosing cholangitis, or a combination thereof. In some embodiments, the EIM comprises ankylosing spondylitis, sacroiliitis, erythema nodosum, pyoderma gangrenosum, psoriasis, eye, peripheral arthritis, or primary sclerosing cholangitis, or a combination thereof. In some embodiments, the subject comprises a serological marker selected from the group comprising anti-neutrophil cytoplasmic antibodies (ANCA), anti-Saccharomyces cerevisiae antibodies (ASCA), anti-outer member porin C (anti-OmpC), anti-Pseudomonas fluorescens bacterial sequence 12 (anti-I2), and anti-bacterial flagellin (CBir1). In some embodiments, the inflammatory bowel disease comprises Crohn's disease. In some embodiments, the subject has a Crohn's disease (CD) phenotype selected from the group comprising upper GI, colonic, small bowel, structuring, penetrating, structuring and penetrating, and perianal CD. In some embodiments, the subject has undergone surgery for treatment of the inflammatory bowel disease. In some embodiments, the inflammatory bowel disease comprises ulcerative colitis. In some embodiments, the subject is female. In some embodiments, the subject is male. In some embodiments, the subject is Jewish. In some embodiments, the subject is was diagnosed with inflammatory bowel disease before age 17. In some embodiments, the subject is was diagnosed with inflammatory bowel disease before age 10. In some embodiments, the subject is a smoker. In some embodiments, the method comprises determining whether the subject comprises the one or more single nucleotide polymorphisms.

[0017] Additional aspects and advantages of the present disclosure will become readily apparent to those skilled in this art from the following detailed description, wherein only illustrative embodiments of the present disclosure are shown and described. As will be realized, the present disclosure is capable of other and different embodiments, and its several details are capable of modifications in various obvious respects, all without departing from the disclosure. Accordingly, the drawings and description are to be regarded as illustrative in nature, and not as restrictive.

### INCORPORATION BY REFERENCE

[0018] All publications, patents, and patent applications mentioned in this specification are herein incorporated by reference to the same extent as if each individual publication, patent, or patent application was specifically and individually indicated to be incorporated by reference. To the extent publications and patents or patent applications incorporated by reference contradict the disclosure contained in the specification, the specification is intended to supersede and/or take precedence over any such contradictory material.

### BRIEF DESCRIPTION OF THE DRAWINGS

[0019] The novel features of the inventive concepts set forth with particularity in the appended claims. A better understanding of the features and advantages of the present invention will be obtained by reference to the following detailed description that sets forth illustrative embodiments, in which the principles of the invention are utilized, and the accompanying drawings (also “Figure” and “FIG.” herein), of which:

[0020] FIG. 1 shows a workflow according to an embodiment of the present disclosure for processing a biological sample obtained from a subject to inform the selection of a therapeutic agent to treat a disease or a condition of the subject.

[0021] FIG. 2 shows a computer-implemented workflow according to an embodiment of the present disclosure for generating an electronic report to a user, such as a physician, comprising a EIM profile of a subject based on an analysis of genotype data from the subject.

[0022] FIG. 3 shows a computer system that is programmed or otherwise configured to implement methods provided herein.

[0023] FIG. 4 shows a computer-implemented workflow according to an embodiment of the present disclosure for producing a EIM profile.

[0024] FIG. 5 shows the numbers of subjects with an EIM in the CEDARS, SHARE, NIDDK and RISK (CD) cohorts.

[0025] FIG. 6 shows the total unique number of subjects with an EIM with Crohn's disease, ulcerative colitis, or ulcerative colitis and inflammatory bowel disease unknown.

[0026] FIG. 7 shows a principle component analysis of all cohorts analyzed for EIM risk.

[0027] FIGS. 8A-8C depicts the results of the models to predict sensitivity and specificity of primary sclerosing cholangitis in subjects with Crohn's disease.

### DETAILED DESCRIPTION

[0028] Provided herein are methods, systems, and kits for identifying a subject who may develop an extra-intestinal manifestation based on the subject's genotype. The subject may be a patient, who may be diagnosed with an inflammatory disease, a fibrostenotic disease, or a fibrotic disease, such as inflammatory bowel disease (IBD) or Crohn's disease (CD). The subject may not be a patient, but may be suspected of having the inflammatory disease, the fibrostenotic disease, or the fibrotic disease. The genotype may, in some cases, be useful for characterizing the inflammatory fibrostenotic, or fibrotic disease or condition, as mediated by TL1A. The subject, in some embodiments, is treated by administering the therapeutic agent (e.g., anti-TL1A antibody) to the subject, provided the genotype is detected. In some cases, identifying the subject as being suitable for treatment with the inhibitor of activity or expression is required in order to administer the inhibitor to the subject.

[0029] Referring to FIG. 1, the methods, systems and kits of the present disclosure involve, in some embodiments, the steps of providing a buccal swab sample from a subject 101 (although other biological samples and methods may be substituted), optionally purifying DNA from the sample by processing the sample 102, assaying the optionally processed sample to detect genotypes of at least one genetic locus in the sample 103, processing the genotypes to produce a EIM profile 104, and selecting a therapy to treat a disease or disorder of the subject based on the EIM profile 105.

[0030] The genotypes described herein are detected using suitable genotyping devices (e.g., array, sequencing). In some instances, a sample is obtained from the subject or patient indirectly or directly. In some instances, the sample may be obtained by the subject. In other instances, the sample may be obtained by a healthcare professional, such as a nurse or physician. The sample may be derived from virtually any biological fluid or tissue containing genetic information, such as blood.

[0031] The subject disclosed herein can be a mammal, such as for example a mouse, rat, guinea pig, rabbit, non-human primate, or farm animal. In some instances, the subject is human. In some instances, the subject is suffering from a symptom related to a disease or condition disclosed herein (e.g., abdominal pain, cramping, diarrhea, rectal bleeding, fever, weight loss, fatigue, loss of appetite, dehydration, and malnutrition, anemia, or ulcers).

[0032] In some embodiments, the subject is susceptible to, or is inflicted with, thiopurine toxicity, or a disease caused by thiopurine toxicity (such as pancreatitis or leukopenia). The subject may experience, or is suspected of experiencing, non-response or loss-of-response to a standard treatment (e.g., anti-TNF alpha therapy, anti-a4-b7 therapy (vedolizumab), anti-IL12p40 therapy (ustekinumab), Thalidomide, or Cytoxin).

[0033] The disease or condition disclosed herein may be an inflammatory disease, a fibrostenotic disease, or a fibrotic disease. In some instances, the disease or the condition is a TL1A-mediated disease or condition. The term, “TL1A-mediated disease or condition” refers to a disease or a condition pathology or pathogenesis that is driven, at least in part, by TL1A signaling. In some instances, the disease or the condition is immune-mediated disease or condition, such as those mediated by TL1A.

[0034] In some embodiments the disease or the condition is an inflammatory disease or disorder that is mediated, at least in part, by TL1A signaling. Non-limiting examples of inflammatory disease include, allergy, ankylosing spondylitis, asthma, atopic dermatitis, autoimmune diseases or disorders, cancer, celiac disease, chronic obstructive pulmonary disease (COPD), chronic peptic ulcer, cystic fibrosis, diabetes (e.g., type 1 diabetes and type 2 diabetes), glomerulonephritis, gout, hepatitis (e.g., active hepatitis), an immune-mediated disease or disorder, inflammatory bowel disease (IBD) such as Crohn's disease and ulcerative colitis, myositis, osteoarthritis, pelvic inflammatory disease (PID), multiple sclerosis, neurodegenerative diseases of aging, periodontal disease (e.g., periodontitis), preperfusion injury transplant rejection, psoriasis, pulmonary fibrosis, rheumatic disease, scleroderma, sinusitis, tuberculosis.

[0035] In some embodiments, the disease or the condition is an autoimmune disease that is mediated, at least in part, by TL1A signaling. Non-limiting examples of autoimmune disease or disorder include Achalasia, Addison's disease, Adult Still's disease, Agammaglobulinemia, Alopecia areata, Amyloidosis, Ankylosing spondylitis, Anti-GBM/Anti-TBM nephritis, Antiphospholipid syndrome, Autoimmune angioedema, Autoimmune dysautonomia, Autoimmune encephalomyelitis, Autoimmune hepatitis, Autoimmune inner ear disease (AIED), Autoimmune myocarditis, Autoimmune oophoritis, Autoimmune orchitis, Autoimmune pancreatitis, Autoimmune retinopathy, Autoimmune urticaria, Axonal & neuronal neuropathy (AMAN), Baló disease, Behcet's disease, Benign mucosal pemphigoid, Bullous pemphigoid, Castleman disease (CD), Celiac disease, Chagas disease, Chronic inflammatory demyelinating polyneuropathy (CIDP), Chronic recurrent multifocal osteomyelitis (CRMO), Churg-Strauss Syndrome (CSS) or Eosinophilic Granulomatosis (EGPA), Cicatricial pemphigoid, Cogan's syndrome, Cold agglutinin disease, Congenital heart block, Coxsackie myocarditis, CREST syndrome, Crohn's disease, Dermatitis herpetiformis, Dermatomyositis, Devic's disease (neuromyelitis optica), Discoid lupus, Dressler's syndrome, Endometriosis, Eosinophilic esophagitis (EoE), Eosinophilic fasciitis, Erythema nodosum, Essential mixed cryoglobulinemia, Evans syndrome, Fibromyalgia, Fibrosing alveolitis, Giant cell arteritis (temporal arteritis), Giant cell myocarditis, Glomerulonephritis, Goodpasture's syndrome, Granulomatosis with Polyangiitis, Graves' disease, Guillain-Barre syndrome, Hashimoto's thyroiditis, Hemolytic anemia, Henoch-Schonlein purpura (HSP), Herpes gestationis or pemphigoid gestationis (PG), Hidradenitis Suppurativa (HS) (Acne Inversa), Hypogammalglobulinemia, IgA Nephropathy, IgG4-related sclerosing disease, Immune thrombocytopenic purpura (ITP), Inclusion body myositis (IBM), Interstitial cystitis (IC), Juvenile arthritis, Juvenile diabetes (Type 1 diabetes), Juvenile myositis (JM), Kawasaki disease, Lambert-Eaton syndrome, Leukocytoclastic vasculitis, Lichen planus, Lichen sclerosus, Ligneous conjunctivitis, Linear IgA disease (LAD), Lupus, Lyme disease chronic, Meniere's disease, Microscopic polyangiitis (MPA), Mixed connective tissue disease (MCTD), Mooren's ulcer, Mucha-Habermann disease, Multifocal Motor Neuropathy (MMN) or MMNCB, Multiple sclerosis, Myasthenia gravis, Myositis, Narcolepsy, Neonatal Lupus, Neuromyelitis optica, Neutropenia, Ocular cicatricial pemphigoid, Optic neuritis, Palindromic rheumatism (PR), PANDAS, Paraneoplastic cerebellar degeneration (PCD), Paroxysmal nocturnal hemoglobinuria (PNH), Parry Romberg syndrome, Pars planitis (peripheral uveitis), Parsonage-Turner syndrome, Pemphigus, Peripheral neuropathy, Perivenous encephalomyelitis, Pernicious anemia (PA), POEMS syndrome, Polyarteritis nodosa, Polyglandular syndromes type I, II, III, Polymyalgia rheumatica, Polymyositis, Postmyocardial infarction syndrome, Postpericardiotomy syndrome, Primary biliary cirrhosis, Primary sclerosing cholangitis, Progesterone dermatitis, Psoriasis, Psoriatic arthritis, Pure red cell aplasia (PRCA), Pyoderma gangrenosum, Raynaud's phenomenon, Reactive Arthritis, Reflex sympathetic dystrophy, Relapsing polychondritis, Restless legs syndrome (RLS), Retroperitoneal fibrosis, Rheumatic fever, Rheumatoid arthritis, Sarcoidosis, Schmidt syndrome, Scleritis, Scleroderma, Sjögren's syndrome, Sperm & testicular autoimmunity, Stiff person syndrome (SPS), Subacute bacterial endocarditis (SBE), Susac's syndrome, Sympathetic ophthalmia (SO), Takayasu's arteritis, Temporal arteritis/Giant cell arteritis, Thrombocytopenic purpura (TTP), Tolosa-Hunt syndrome (THS), Transverse myelitis, Type 1 diabetes, Ulcerative colitis (UC), Undifferentiated connective tissue disease (UCTD), Uveitis, Vasculitis, Vitiligo, and Vogt-Koyanagi-Harada Disease.

[0036] In some embodiments, the disease or the condition is a cancer that is mediated, at least in part, by TL1A signaling. Non-limiting examples of cancers include Adenoid Cystic Carcinoma, Adrenal Gland Cancer, Amyloidosis, Anal Cancer, Ataxia-Telangiectasia, Atypical Mole Syndrome, Basal Cell Carcinoma, Bile Duct Cancer, Birt Hogg Dube Syndrome, Bladder Cancer, Bone Cancer, Brain Tumor, Breast Cancer, Breast Cancer in Men, Carcinoid Tumor, Cervical Cancer, Colorectal Cancer, Ductal Carcinoma, Endometrial Cancer, Esophageal Cancer, Gastric Cancer, Gastrointestinal Stromal Tumor (GIST), HER2-Positive Breast Cancer, Islet Cell Tumor, Juvenile Polyposis Syndrome, Kidney Cancer, Laryngeal Cancer, Leukemia—Acute Lymphoblastic Leukemia, Leukemia—Acute Lymphocytic (ALL), Leukemia—Acute Myeloid AML, Leukemia—Adult, Leukemia—Childhood, Leukemia—Chronic Lymphocytic (CLL), Leukemia—Chronic Myeloid (CML), Liver Cancer, Lobular Carcinoma, Lung Cancer, Lung Cancer—Small Cell (SCLC), Lung Cancer—Non-small Cell (NSCLC), Lymphoma—Hodgkin's, Lymphoma—Non-Hodgkin's, Malignant Glioma, Melanoma, Meningioma, Multiple Myeloma, Myelodysplastic Syndrome (MDS), Nasopharyngeal Cancer, Neuroendocrine Tumor, Oral Cancer, Osteosarcoma, Ovarian Cancer, Pancreatic Cancer, Pancreatic Neuroendocrine Tumors, Parathyroid Cancer, Penile Cancer, Peritoneal Cancer, Peutz-Jeghers Syndrome, Pituitary Gland Tumor, Polycythemia Vera, Prostate Cancer, Renal Cell Carcinoma, Retinoblastoma, Salivary Gland Cancer, Sarcoma, Sarcoma—Kaposi, Skin Cancer, Small Intestine Cancer, Stomach Cancer, Testicular Cancer, Thymoma, Thyroid Cancer, Uterine (Endometrial) Cancer, Vaginal Cancer, and Wilms' Tumor.

[0037] In some embodiments, the disease or the condition is an inflammatory bowel disease, such as Crohn's disease (CD) or ulcerative colitis (UC). A subject may suffer from fibrosis, fibrostenosis, or a fibrotic disease, either isolated or in combination with an inflammatory disease. In some cases, the CD is severe CD. The severe CD may result from inflammation that has led to the formation of scar tissue in the intestinal wall (fibrostenosis) and/or swelling. In some cases, the severe CD is characterized by the presence of fibrotic and/or inflammatory strictures. The strictures may be determined by computed tomography enterography (CTE), and magnetic resonance imaging enterography (MRE). The disease or condition may be characterized as refractory, which in some cases, means the disease is resistant to a standard treatment (e.g., anti-TNFα therapy). Non-limiting examples of standard treatment include glucocorticosteriods, anti-TNF therapy, anti-a4-b7 therapy (vedolizumab), anti-IL12p40 therapy (ustekinumab), Thalidomide, and Cytoxin.

[0038] In some embodiments, the subject is at risk for an extra-intestinal manifestation (EIM). In some embodiments, the EIM comprises ankylosing spondylitis, sacroiliitis, erythema nodosum, pyoderma gangrenosum, psoriasis, a manifestation in the eye, or primary sclerosing cholangitis, or a combination thereof.

### Genotypes

[0039] Disclosed herein are genotypes that may be detected in a sample obtained from a subject by analyzing the genetic material in the sample. In some instances, the subject may be human. In some embodiments, the genetic material is obtained from a subject having a disease or condition disclosed herein. In some cases, the genetic material is obtained from blood, serum, plasma, sweat, hair, tears, urine, and other techniques known by one of skill in the art. In some cases, the genetic material is obtained from a biopsy, e.g., from the intestinal track of the subject.

[0040] The genotypes of the present disclosure comprise genetic material that is deoxyribonucleic acid (DNA). In some instances, the genotype comprises a denatured DNA molecule or fragment thereof. In some instances, the genotype comprises DNA selected from: genomic DNA, viral DNA, mitochondrial DNA, plasmid DNA, amplified DNA, circular DNA, circulating DNA, cell-free DNA, or exosomal DNA. In some instances, the DNA is single-stranded DNA (ssDNA), double-stranded DNA, denaturing double-stranded DNA, synthetic DNA, and combinations thereof. The circular DNA may be cleaved or fragmented.

[0041] The genotypes disclosed herein comprise at least one polymorphism at a gene or genetic locus described herein. In some instances, the gene or genetic locus is selected from the group consisting of actin related protein 2 (ACTR2), DS cell adhesion molecule (DSCAM), interleukin 21 antisense RNA 1 (IL21-AS1), psoriasis susceptibility 1 candidate 1 (PSORSICI), psoriasis susceptibility 1 candidate 3 (PSORS1C3), dystrotelin (DYTN), interleukin 1 receptor like 2 (IL1RL2), centrosomal protein 128 (CEP128), B cell scaffold protein with ankyrin repeats 1 (BANK1), Long intergenic non-protein coding RNA 2825 (LINC02825), major histocompatibility complex class I B (HLA-B), complement factor B (CFB), histocompatibility complex class I C (HLA-C), mucin 19 (MUC19), C-type lectin domain containing 16A (CLEC16A), major histocompatibility complex class II DQ (HLA-DQA2), UDP glycosyltransferase family 3 member A1 (UGT3A1), homeobox A3 (HOXA3), SP140 nuclear body protein like (SP140L), or a combination thereof. In some instances, the gene or genetic locus comprises a gene or genetic locus provided in Table 1. The genotypes disclosed herein are, in some cases, a haplotype. In some instances, the genotype comprises a particular polymorphism, a polymorphism in linkage disequilibrium (LD) therewith, or a combination thereof. In some cases, LD is defined by an r² of at least or about 0.70, 0.75, 0.80, 0.85, 0.90, or 1.0. The genotypes disclosed herein can comprise at least or about 1, 2, 3, 4, 5, 6, 7, 8, 9, 10, 11, 12, 13, 14, 15, 16, 17, 18, 19, 20, 21, 22, 23, 24, 25, 26, 27, 28, 29, 30, or more polymorphisms. In some embodiments, the genotypes disclosed herein comprise a combination of 3 polymorphisms, such as those provided in Table 1.

[0042] The polymorphisms described herein can be a single nucleotide polymorphism, or an indel (insertion/deletion). In some instances, the polymorphism is an insertion or a deletion of at least one nucleobase (e.g., an indel). In some instances, the genotype may comprise a copy number variation (CNV), which is a variation in a number of a nucleic acid sequence between individuals in a given population. In some instances, the CNV comprises at least or about two, three, four, five, six, seven, eight, nine, ten, twenty, thirty, forty or fifty nucleic acid molecules. In some instances, the genotype is heterozygous. In some instances, the genotype is homozygous.

[0043] Disclosed herein, in the following embodiments, are genotypes disclosed herein:
[0044] 1. A genotype comprising at least one polymorphism at a gene or genetic locus.
[0045] 2. The genotype of embodiment 1 comprising a polymorphism provided in Table 1.
[0046] 3. The genotype of embodiments 1-2 that is heterozygous.
[0047] 4. The genotype of embodiments 1-2 that is homozygous.
[0048] 5. The genotype of embodiments 1-4, wherein the genotype comprises at least two polymorphisms.
[0049] 6. The genotype of embodiments 1-4, wherein the genotype comprises at least three polymorphisms.
[0050] 7. The genotype of embodiments 1-4, wherein the genotype comprises at least four polymorphisms.
[0051] 8. The genotype of embodiment 1, comprising a polymorphism in linkage disequilibrium with a polymorphism provided in Table 1.
[0052] 9. The genotype of embodiment 8, wherein LD is defined by (i) a D′ value of at least about 0.70, or (ii) a D′ value of 0 and an r² value of at least about 0.70.
[0053] 10. The genotype of embodiment 8, wherein LD is defined by (i) a D′ value of at least about 0.80, or (ii) a D′ value of 0 and an r² value of at least about 0.80.
[0054] 11. The genotype of embodiment 8, wherein LD is defined by (i) a D′ value of at least about 0.90, or (ii) a D′ value of 0 and an r² value of at least about 0.90.
[0055] 12. The genotype of embodiment 8, wherein LD is defined by (i) a D′ value of at least about 0.95, or (ii) a D′ value of 0 and an r² value of at least about 0.95.
[0056] 13. The genotype of embodiments 1-12, wherein the gene or genetic locus is selected from the group consisting of actin related protein 2 (ACTR2), DS cell adhesion molecule (DSCAM), interleukin 21 antisense RNA 1 (IL21-AS1), psoriasis susceptibility 1 candidate 1 (PSORSICI), psoriasis susceptibility 1 candidate 3 (PSORS1C3), dystrotelin (DYTN), interleukin 1 receptor like 2 (IL1RL2), centrosomal protein 128 (CEP128), B cell scaffold protein with ankyrin repeats 1 (BANK1), Long intergenic non-protein coding RNA 2825 (LINC02825), major histocompatibility complex class I B (HLA-B), complement factor B (CFB), histocompatibility complex class I C (HLA-C), mucin 19 (MUC19), C-type lectin domain containing 16A (CLEC16A), major histocompatibility complex class II DQ (HLA-DQA2), UDP glycosyltransferase family 3 member A1 (UGT3A1), homeobox A3 (HOXA3), SP140 nuclear body protein like (SP140L).
[0057] 14. The genotype of embodiments 5-6, wherein the genotype comprises at least two polymorphisms selected from:
   [0058] a. rs6905036, rs2844510, rs2516514, and rs17030062;
   [0059] b. rs9276456, rs2858884, rs2858319, rs6917611, rs6930571, rs389419, rs76558762, rs7956721, rs887864, and rs9276424;
   [0060] c. rs10056322, rs6461986, and rs13421864;
   [0061] d. rs4349859, rs4418214, rs3819299, rs2373969, rs4151651, and rs9366775;
   [0062] e. rs80079682, rs115994059, rs7297515, rs13166683, rs62376929, rs9305694, rs139009610, rs28732100, rs12199223, rs1265181, rs13417109, rs17026757, and rs117670930;
   [0063] f. rs4349859, rs4463302, rs4418214, rs2069835, rs2516514, rs17030062, rs9305694, rs139009610, rs28732100, rs12199223, rs1265181, rs13417109, rs17026757, rs117670930, rs115994059, rs7297515, rs13166683, rs62376929, rs4418214, rs3819299, rs2373969, rs4151651, rs9366775, rs2858884, rs2858319, rs6917611, rs6930571, rs389419, rs76558762, rs7956721, rs887864, and rs9276424; or
   [0064] g. rs61199332, rs7857730, rs497871, rs2516514, rs17030062, rs9305694, rs139009610, rs28732100, rs12199223, rs1265181, rs13417109, rs17026757, rs117670930, rs115994059, rs7297515, rs13166683, rs62376929, rs4418214, rs3819299, rs2373969, rs4151651, rs9366775, rs2858884, rs2858319, rs6917611, rs6930571, rs389419, rs76558762, rs7956721, rs887864, rs9276424, rs10056322, rs6461986, rs13421864, rs80079682, rs6905036, rs4349859, rs2844510, rs9276456, rs4463302, rs4418214, and rs2069835.
[0065] 15. The genotype of embodiments 1-14, wherein the genotype comprises a minor allele provided in Table 1 for at least one polymorphism.
[0066] 16. The genotype of embodiments 1-15, wherein the genotype comprises a major allele provided in Table 1 for at least one polymorphism.

[0067] Aspects disclosed herein provide genotypes that are associated with, and therefore indicative of, a subject having or being susceptible to developing a particular disease or condition, or a subclinical phenotype thereof. In addition, the genotypes disclosed herein are associated with an extra-intestinal manifestation. Table 1 provides exemplary polymorphisms associated with, and therefore predictive of, an extra-intestinal manifestation. In some embodiments, the polymorphisms are associated with the likelihood of developing an EIM.

TABLE 1

| | | | | | SEQ |
|---|---|---|---|---|---|
| | | | Minor | Major | ID |
| rsID | Gene | | Allele | Allele | NO |
| rs2516514 | — | GGTAACTAGACCAGGCAGTGCCCTCCTTGTCAGTCTGCC | A, C | T | 2001 |
| | | TGTCTGCCTGG[T/A/C]TCCCTCTCAGAGTTTGTGTCTTCA | | | |
| | | CTCGGTTCATCATCCCCAGCCCCAGC | | | |
| rs17030062 | ACTR2 | TGTTAAGATACGAACTACCCATCTGAACGATTATAATTG | A | G | 2002 |
| | | GAAGACTTTGA[G/A]TGATGTGATTATTTGCCACTTTGCC | | | |
| | | ATGTTGTATGTCCAGTGTGTGTAGC | | | |
| rs9305694 | DSCAM | ACACAAGCATGCACACAAGTAGCTG[G]TAATCACATTG | A | G | 2003 |
| | | TCCTTAATTTGCAT | | | |
| rs139009610 | IL21- | CACACACACACACACACACACACACACACAAGCATGCA | C | A | 2004 |
| | AS1 | CACAAGTAGCTG[G/A]TAATCACATTGTCCTTAATTTGC | | | |
| | | ATCCAAAGAGGGTCAGCTGATTCTGAG | | | |
| rs28732100 | PSORS1C1 | TTACATGCTGGACATGGGCAAGATAGGAACTCAAGTTA | T | C | 2005 |
| | | CTTCCAGGTCTC[C/T]GTAAGTTTAGGACTGTGAAGAGG | | | |
| | | GCATCCTAATAGTCAAAAACATAAGTG | | | |
| rs12199223 | — | TCCTACCAGCAATAGCAGACATTCCTATTTTTTCCATAT | A | T | 2006 |
| | | TCTTGCCAGTG[T/A]TAAGACTTATCATATGTCTTTTTAA | | | |
| | | CTTTACCTGCTCTAGGTGATGTGTG | | | |
| rs1265181 | PSORS1C3 | TCTCTTTCCTTTGGCCTAGTTTGAGTGCCCAGCAGGTGT | C | G | 2007 |
| | | TTCAAGTCACT[G/C]ATTACGTATCTACTCTGCGAAAGTT | | | |
| | | GTTTGTGCAGCCTGTTTATCCTCTC | | | |
| rs13417109 | DYTN | TGAAAAACAGGTGGGAGAGAGTGAAGAGCATGATGAT | T | A | 2008 |
| | | GAATTCATTTTTT[A/T]AAAAATCTGTGCACTTTGCATTT | | | |
| | | TAATTTACAATAAACATACAGTATTAC | | | |
| rs17026757 | IL1RL2 | GCTTGGAAATTAGACAAAAGTAGAGAGGTCAGGTGGGC | C, T | A | 2009 |
| | | TAATTCCAGTTA[A/C/T]GATAGAAAAGTGAGTTGAATG | | | |
| | | GATAGAAAGTTCAGGTGGAAAAGTGTAAT | | | |
| rs117670930 | CEP128 | TCATTTGGTTACAAGGAAGTATTGAAAGTTGAGATGAG | C | T | 2010 |
| | | AAGAATAAATTA[T/C]GGAATGCAGCTCCCTGTCTAATA | | | |
| | | TTTGCATTATTATGTTTCAGACATACA | | | |
| rs115994059 | BANK1 | TTTTTTCTAGTGTCTGAAATGTGGTCTCAAAGGGAGGTG | T | G | 2011 |
| | | TAGAGAGGAGA[G/T]TAACAATGCCCCGTTGGTTGCAGT | | | |
| | | TAGAGGGGCAGACAAGTAAGAAGGTG | | | |
| rs7297515 | LINC02825 | TTTCCTGATCCTAAGCATCGAATATGGTTATGTAAGTAA | G | A | 2012 |
| | | CATCAGGAGAA[A/G]TTGGATGAAGAATATTTTGGAACT | | | |
| | | CTCTGTACTAATTTTTAGGCTGTTCT | | | |
| rs13166683 | — | CCTGTTTTACAGAGTAGTTGACCAAAGAAGAGCCTTAG | A, C | G | 2013 |
| | | GGAATAAATGAA[G/A/C]TAGTTCAAAAGGAAGTAGATT | | | |
| | | TTAATAAAAACCTAAATGAGTAGCATCAG | | | |
| rs62376929 | — | ATGAGGCACAACTTTAGTCCTTCCCCAAATACCTTGTCT | A | T | 2014 |
| | | GATCTGCCAAC[T/A]GAGACACCGCAGAGGGAAAGTGA | | | |
| | | TAGGGTGGCCAGTTCTGGGGCCTCACT | | | |
| rs4418214 | — | AAAGAAGAATAGCTCTCTCTCCTGTGAGAGAAGGGGCA | C | T | 2015 |
| | | CGCAAGTGGGAA[T/C]TCCAGCCCATGGCAGAGTGCACT | | | |
| | | GGATTTTATACACAGGCTGAAAGAGGT | | | |
| rs3819299 | HLA- | AAAACAGGACCTGGTCAGAGCCCGCAGGAGACGTGGG | G | T | 2016 |
| | B | ACAGGAGGAATTA[T/G]GGGGTGGGTGAGCTCCTCCACA | | | |
| | | CTCCCACCCCCACCACTTACACGCAGCC | | | |
| rs2373969 | — | CTTATAAGACTCTCCATGTTCTAGCCTCCCCAGCTACCT | A, C | G | 2017 |
| | | CCTGAATACTC[G/A/C]TGTGTTGTCACTCCCTTCTCTCTC | | | |
| | | ATACTCCATTTCATCACACACTCCAA | | | |
| rs4151651 | CFB | TGTCTTCCCTGACAGAGACCATAGAAGGAGTCGATGCT | A, T | G | 2018 |
| | | GAGGATGGGCAC[G/A/T]GCCCAGGTTTGAAGACAGAGA | | | |
| | | AGGGAGGCAGGGCAGGGAACTGGGGGAAA | | | |
| rs9366775 | HLA— | GCGGCGCCTCCCCAATGCAGACACGGCCCTTGGAGCCT | A, T | G | 2019 |
| | C | GAGACCCTGAGA[G/A/T]CCCCGCCCGGGACCTGGGACT | | | |
| | | TCGTCCTGATCCCTCTTCTCCTACACCAA | | | |
| rs2858884 | — | GCTCTGTTTTTAGGTGCATACACACTTAAGATTGTTTTG | C | A | 2020 |
| | | TGTCTTTGGAG[A/C]AATAACCCCTTATCATTAAATAAT | | | |
| | | ATCCCTCTTTATCCCTGGTAATATTC | | | |
| rs2858319 | — | TGTTCATTTTAATTGATGCTGAAAAAAGCATTTGATAAA | C, A | T | 2021 |
| | | ATTTAACATCA[T/A/C]TTCATGTTAAAAATTCTCAAAAA | | | |
| | | CTGGGGATATAAAGAACATACTTCAAC | | | |
| rs6917611 | — | TACACTCCAATGAGTGGTGTCAGCCAAAGTGTTTCATAG | C, T | G | 2022 |
| | | TACAGTGACAG[G/C/T]AGGATCTGTCCTTGTTTGAGTGT | | | |
| | | ACCAGCAGCAGTGGTAGTTGAAGCTGC | | | |
| rs6930571 | — | GAAGCTGCACTCACAGAGATATCCGGGCATGTCTCACA | T | G | 2023 |
| | | CTGGAAATAGGG[G/T]ACCCTTCCAAATATTGGGAGAAA | | | |
| | | GAAGGCAAAGAAAATCATACCGATATA | | | |
| rs389419 | — | CTCGTCTCCCCGCGCCTATGTCGCACGCTGGCCAGCGCC | T | C | 2024 |
| | | TCCTGGCTAAG[C/T]GGCCTCACCAACTCGGTTGCGCAA | | | |
| | | ACCGCGCTCCTGGCTGAGCGGCCGCT | | | |
| rs76558762 | — | ACATGGTCTTAATCAGTTTGAGGAAGAACTTTTCCCTTT | G | T | 2025 |
| | | GTTTTGTTTTG[T/G]TTTTGCTGAAACCTGTTTATTGTTGA | | | |
| | | TTGTTTTATCTTTTAATTTCAAAT | | | |
| rs7956721 | MUC19 | TCCCCCTTTCCTGGATTCTTCTGCTTTTCTGGGGAGATAA | C, T | G | 2026 |
| | | ACTAAGGACT[G/C/T]CTTTCATTTTAGCTGCTAAAGTCT | | | |
| | | TTTCTTGGTAGCAACTGGGAGCAGAT | | | |
| rs887864 | CLEC16A | CTTAAGCAACACTCTGAGAACAGTGTCCTGAGACATTC | A, C, | G | 2027 |
| | | AGGTCATTGCTC[G/A/C/T]GATGATGGCACTGTTTTGAG | T | | |
| | | GGGTAAGAAAGATATAGCTCTGGCTGCTTT | | | |
| rs9276424 | HLA- | GCCCGTCTCAACCTCCCAAAGTGCTGGGATTACAGGCG | A, G, | C | 2028 |
| | DQA2 | TGATCCACCGCG[C/A/G/T]CCGGCCTTAACTTTTAATGTA | T | | |
| | | GCCTGGATTGTATTTGTCTTTATACCAAT | | | |
| rs10056322 | UGT3A1 | AAGGGAAACTGATCTACCCTCTCTGAGGGCCTCTTTAGA | G | A | 2029 |
| | | AGATAACATTC[A/G]TGAAGAGGAGCTAGTAGTGTTCTA | | | |
| | | ATTCTGAAAGTCACTCCGGGTCTGTA | | | |
| rs6461986 | HOXA3 | CCTGCCATTGTATGGAGTTTGCTAACACCCACACCATAC | C, T | A | 2030 |
| | | ACTACAGACGC[A/C/T]AGAAACACCAAAAAGGCACATA | | | |
| | | ATTACCTGACAAAAGGTTAAAGCATCTC | | | |
| rs13421864. | SP140L | CACCCATCTTCTGCGTCGCTCACGCTGGGAGCTGTAGAC | A, G | C | 2031 |
| | | CGGAGCTGTTC[C/A/G]TATTCGGCCATCTTGGCTCCCGG | | | |
| | | AGCCTGCGTTTTTCTTTAATGGAAAGG | | | |

### Methods

### Methods of Detection

[0068] Methods disclosed herein for detecting a genotype in a sample from a subject comprise analyzing the genetic material in the sample to detect at least one of a presence, an absence, and a quantity of a nucleic acid sequence encompassing the genotype of interest. In some embodiments, the sample is assayed to measure a presence, absence or quantity of at least one, two, or three polymorphisms. In some embodiments, the sample is assayed to measure a presence, absence, or quantity of at least four polymorphisms. In some embodiments, the sample is assayed to measure a presence, absence, or quantity of at least five polymorphisms. In some embodiments, at least one, two, or three genotypes are detected, using the methods described herein.

[0069] In some cases, the nucleic acid sequence comprises DNA. In some instances, the nucleic acid sequence comprises a denatured DNA molecule or fragment thereof. In some instances, the nucleic acid sequence comprises DNA selected from: genomic DNA, viral DNA, mitochondrial DNA, plasmid DNA, amplified DNA, circular DNA, circulating DNA, cell-free DNA, or exosomal DNA. In some instances, the DNA is single-stranded DNA (ssDNA), double-stranded DNA, denaturing double-stranded DNA, synthetic DNA, and combinations thereof. The circular DNA may be cleaved or fragmented. In some instances, the nucleic acid sequence comprises RNA. In some instances, the nucleic acid sequence comprises fragmented RNA. In some instances, the nucleic acid sequence comprises partially degraded RNA. In some instances, the nucleic acid sequence comprises a microRNA or portion thereof. In some instances, the nucleic acid sequence comprises an RNA molecule or a fragmented RNA molecule (RNA fragments) selected from: a microRNA (miRNA), a pre-miRNA, a pri-miRNA, a mRNA, a pre-mRNA, a viral RNA, a viroid RNA, a virusoid RNA, circular RNA (circRNA), a ribosomal RNA (rRNA), a transfer RNA (tRNA), a pre-tRNA, a long non-coding RNA (lncRNA), a small nuclear RNA (snRNA), a circulating RNA, a cell-free RNA, an exosomal RNA, a vector-expressed RNA, an RNA transcript, a synthetic RNA, and combinations thereof.

[0070] Nucleic acid-based detection techniques that may be useful for the methods herein include quantitative polymerase chain reaction (qPCR), gel electrophoresis, immunochemistry, in situ hybridization such as fluorescent in situ hybridization (FISH), cytochemistry, and next generation sequencing. In some embodiments, the methods involve TaqMan™ qPCR, which involves a nucleic acid amplification reaction with a specific primer pair, and hybridization of the amplified nucleic acids with a hydrolysable probe specific to a target nucleic acid.

[0071] In some instances, the methods involve hybridization and/or amplification assays that include, but are not limited to, Southern or Northern analyses, polymerase chain reaction analyses, and probe arrays. Non-limiting amplification reactions include, but are not limited to, qPCR, self-sustained sequence replication, transcriptional amplification system, Q-Beta Replicase, rolling circle replication, or any other nucleic acid amplification known in the art. As discussed, reference to qPCR herein includes use of TaqMan™ methods. An additional exemplary hybridization assay includes the use of nucleic acid probes conjugated or otherwise immobilized on a bead, multi-well plate, or other substrate, wherein the nucleic acid probes are configured to hybridize with a target nucleic acid sequence of a genotype provided herein. A non-limiting method is one employed in Anal Chem. 2013 Feb. 5; 85(3):1932-9.

[0072] In some embodiments, detecting the presence or absence of a genotype comprises sequencing genetic material from the subject. Sequencing can be performed with any appropriate sequencing technology, including but not limited to single-molecule real-time (SMRT) sequencing, Polony sequencing, sequencing by ligation, reversible terminator sequencing, proton detection sequencing, ion semiconductor sequencing, nanopore sequencing, electronic sequencing, pyrosequencing, Maxam-Gilbert sequencing, chain termination (e.g., Sanger) sequencing, +S sequencing, or sequencing by synthesis. Sequencing methods also include next-generation sequencing, e.g., modern sequencing technologies such as Illumina sequencing (e.g., Solexa), Roche 454 sequencing, Ion torrent sequencing, and SOLiD sequencing. In some cases, next-generation sequencing involves high-throughput sequencing methods. Additional sequencing methods available to one of skill in the art may also be employed.

[0073] In some instances, a number of nucleotides that are sequenced are at least 5, 10, 15, 20, 25, 30, 35, 40, 45, 50, 100, 150, 200, 300, 400, 500, 2000, 4000, 6000, 8000, 10000, 20000, 50000, 100000, or more than 100000 nucleotides. In some instances, the number of nucleotides sequenced is in a range of about 1 to about 100000 nucleotides, about 1 to about 10000 nucleotides, about 1 to about 1000 nucleotides, about 1 to about 500 nucleotides, about 1 to about 300 nucleotides, about 1 to about 200 nucleotides, about 1 to about 100 nucleotides, about 5 to about 100000 nucleotides, about 5 to about 10000 nucleotides, about 5 to about 1000 nucleotides, about 5 to about 500 nucleotides, about 5 to about 300 nucleotides, about 5 to about 200 nucleotides, about 5 to about 100 nucleotides, about 10 to about 100000 nucleotides, about 10 to about 10000 nucleotides, about 10 to about 1000 nucleotides, about 10 to about 500 nucleotides, about 10 to about 300 nucleotides, about 10 to about 200 nucleotides, about 10 to about 100 nucleotides, about 20 to about 100000 nucleotides, about 20 to about 10000 nucleotides, about 20 to about 1000 nucleotides, about 20 to about 500 nucleotides, about 20 to about 300 nucleotides, about 20 to about 200 nucleotides, about 20 to about 100 nucleotides, about 30 to about 100000 nucleotides, about 30 to about 10000 nucleotides, about 30 to about 1000 nucleotides, about 30 to about 500 nucleotides, about 30 to about 300 nucleotides, about 30 to about 200 nucleotides, about 30 to about 100 nucleotides, about 50 to about 100000 nucleotides, about 50 to about 10000 nucleotides, about 50 to about 1000 nucleotides, about 50 to about 500 nucleotides, about 50 to about 300 nucleotides, about 50 to about 200 nucleotides, or about 50 to about 100 nucleotides.

[0074] Exemplary probes comprise a nucleic acid sequence of at least 10 contiguous nucleic acids provided in any one of SEQ ID NOS: 2001-2031 including the nucleobase indicated with a non-nucleobase letter (e.g., R, N, S), or a reverse complement thereof. In some instances, the probes may be used to detect the polymorphisms provided in Table 1, wherein the probe comprises a nucleic acid sequence of at least 10 contiguous nucleic acids provided in a corresponding SEQ ID NO or reverse complement thereof, the 10 contiguous nucleic acids comprising the “risk allele” also provided in Table 1 at a nucleoposition indicated with the non-nucleobase letter, or reverse complement thereof. In some embodiments, the probe comprises at least 70%, 80%, 85%, 90%, 91%, 92%, 93%, 94%, 95%, 96%, 97%, 98% or 99% sequence identity to any one of SEQ ID NOS: 2001-2031, or its reverse complement. In some instances, forward and reverse primers are used to amplify the target nucleic acid sequence. Forward and reverse primers may comprise a nucleic acid sequence flanking the risk allele provided in Table 1 corresponding to the nucleic acid sequence provided in any one of SEQ ID NOS: 2001-2031, or a reverse complement thereof.

[0075] Examples of molecules that are utilized as probes include, but are not limited to, RNA and DNA. In some embodiments, the term “probe” with regards to nucleic acids, refers to any molecule that is capable of selectively binding to a specifically intended target nucleic acid sequence. In some instances, probes are specifically designed to be labeled, for example, with a radioactive label, a fluorescent label, an enzyme, a chemiluminescent tag, a colorimetric tag, or other labels or tags that are known in the art. In some instances, the fluorescent label comprises a fluorophore. In some instances, the fluorophore is an aromatic or heteroaromatic compound. In some instances, the fluorophore is a pyrene, anthracene, naphthalene, acridine, stilbene, benzoxazole, indole, benzindole, oxazole, thiazole, benzothiazole, canine, carbocyanine, salicylate, anthranilate, xanthenes dye, coumarin. Exemplary xanthene dyes include, e.g., fluorescein and rhodamine dyes. Fluorescein and rhodamine dyes include, but are not limited to 6-carboxyfluorescein (FAM), 2′7′-dimethoxy-4′5′-dichloro-6-carboxyfluorescein (JOE), tetrachlorofluorescein (TET), 6-carboxyrhodamine (R6G), N,N,N; N′-tetramethyl-6-carboxyrhodamine (TAMRA), 6-carboxy-X-rhodamine (ROX). Suitable fluorescent probes also include the naphthylamine dyes that have an amino group in the alpha or beta position. For example, naphthylamino compounds include 1-dimethylaminonaphthyl-5-sulfonate, 1-anilino-8-naphthalene sulfonate and 2-p-toluidinyl-6-naphthalene sulfonate, 5-(2′-aminoethyl)aminonaphthalene-1-sulfonic acid (EDANS). Exemplary coumarins include, e.g., 3-phenyl-7-isocyanatocoumarin; acridines, such as 9-isothiocyanatoacridine and acridine orange; N-(p-(2-benzoxazolyl)phenyl) maleimide; cyanines, such as, e.g., indodicarbocyanine 3 (Cy3), indodicarbocyanine 5 (Cy5), indodicarbocyanine 5.5 (Cy5.5), 3-(-carboxy-pentyl)-3′-ethyl-5,5′-dimethyloxacarbocyanine (CyA); 1H, 5H, 11H, 15H-Xantheno[2,3, 4-ij: 5,6, 7-i‘j’]diquinolizin-18-ium, 9-[2 (or 4)-[[[6-[2,5-dioxo-1-pyrrolidinyl)oxy]-6-oxohexyl]amino]sulfonyl]-4 (or 2)-sulfophenyl]-2,3, 6,7, 12,13, 16,17-octahydro-inner salt (TR or Texas Red); or BODIPY™ dyes. In some cases, the probe comprises FAM as the dye label.

[0076] In some instances, primers and/or probes described herein for detecting a target nucleic acid are used in an amplification reaction. In some instances, the amplification reaction is qPCR. An exemplary qPCR is a method employing a TaqMan™ assay. “Wt_Probe_Hex” and “Mut_Probe_FAM” mean “Wild type_probes_tagged with HEX reporter dye” and “Mut_probe_tagged with FAM reporter dye”, respectively. “+” stands for LNA bases (Locked nucleotides), which are analogues that are modified at 2′-O, 4′-C and form a bridge. This bridge results in restricted base pairing giving room to adjust the Tm as needed between the probes. Thus, +A, +T, +C or +G signify A, T, G or C bases are added on the modified backbone.

[0077] In some instances, qPCR comprises using an intercalating dye. Examples of intercalating dyes include SYBR green I, SYBR green II, SYBR gold, ethidium bromide, methylene blue, Pyronin Y, DAPI, acridine orange, Blue View or phycoerythrin. In some instances, the intercalating dye is SYBR.

[0078] In some instances, a number of amplification cycles for detecting a target nucleic acid in an amplification assay is about 5 to about 30 cycles. In some instances, the number of amplification cycles for detecting a target nucleic acid is at least about 5 cycles. In some instances, the number of amplification cycles for detecting a target nucleic acid is at most about 30 cycles. In some instances, the number of amplification cycles for detecting a target nucleic acid is about 5 to about 10, about 5 to about 15, about 5 to about 20, about 5 to about 25, about 5 to about 30, about 10 to about 15, about 10 to about 20, about 10 to about 25, about 10 to about 30, about 15 to about 20, about 15 to about 25, about 15 to about 30, about 20 to about 25, about 20 to about 30, or about 25 to about 30 cycles.

[0079] In one aspect, the methods provided herein for determining the presence, absence, and/or quantity of a nucleic acid sequence from a particular genotype comprise an amplification reaction such as qPCR. In an exemplary method, genetic material is obtained from a sample of a subject, e.g., a sample of blood or serum. In certain embodiments where nucleic acids are extracted, the nucleic acids are extracted using any technique that does not interfere with subsequent analysis. In certain embodiments, this technique uses alcohol precipitation using ethanol, methanol, or isopropyl alcohol. In certain embodiments, this technique uses phenol, chloroform, or any combination thereof. In certain embodiments, this technique uses cesium chloride. In certain embodiments, this technique uses sodium, potassium or ammonium acetate or any other salt commonly used to precipitate DNA. In certain embodiments, this technique utilizes a column or resin based nucleic acid purification scheme such as those commonly sold commercially, one non-limiting example would be the GenElute Bacterial Genomic DNA Kit available from Sigma Aldrich. In certain embodiments, after extraction the nucleic acid is stored in water, Tris buffer, or Tris-EDTA buffer before subsequent analysis. In an exemplary embodiment, the nucleic acid material is extracted in water. In some cases, extraction does not comprise nucleic acid purification.

[0080] In the exemplary qPCR assay, the nucleic acid sample is combined with primers and probes specific for a target nucleic acid that may or may not be present in the sample, and a DNA polymerase. An amplification reaction is performed with a thermal cycler that heats and cools the sample for nucleic acid amplification, and illuminates the sample at a specific wavelength to excite a fluorophore on the probe and detect the emitted fluorescence. For TaqMan™ methods, the probe may be a hydrolysable probe comprising a fluorophore and quencher that is hydrolyzed by DNA polymerase when hybridized to a target nucleic acid. In some cases, the presence of a target nucleic acid is determined when the number of amplification cycles to reach a threshold value is less than 30, 29, 28, 27, 26, 25, 24, 23, 22, 21, or 20 cycles.

[0081] In some embodiments, the target nucleic acid is at least 10 contiguous nucleic acid molecules of SEQ ID NO: 2001 comprising a non-reference allele at nucleoposition 51 within SEQ ID NO: 2001. In some embodiments, the target nucleic acid is at least 10 contiguous nucleic acid molecules of SEQ ID NO: 2001 comprising a “A”, “C” or a “G” allele at nucleoposition 51 within SEQ ID NO: 2001. In some embodiments, detecting the at least 10 contiguous nucleic acid molecules comprising a “A”, “C” or a “G” allele at nucleoposition 51 within SEQ ID NO: 2001 is sufficient to detect the polymorphism at rs2516514.

[0082] In some embodiments, the target nucleic acid is at least 10 contiguous nucleic acid molecules of SEQ ID NO: 2002 comprising a non-reference allele at nucleoposition 51 within SEQ ID NO: 2002. In some embodiments, the target nucleic acid is at least 10 contiguous nucleic acid molecules of SEQ ID NO: 2002 comprising a “A” or a “G” allele at nucleoposition 51 within SEQ ID NO: 2002. In some embodiments, detecting the at least 10 contiguous nucleic acid molecules comprising a “A” “or a “G” allele at nucleoposition 51 within SEQ ID NO: 2002 is sufficient to detect the polymorphism at rs17030062.

[0083] In some embodiments, the target nucleic acid is at least 10 contiguous nucleic acid molecules of SEQ ID NO: 2003 comprising a non-reference allele at nucleoposition 51 within SEQ ID NO: 2003. In some embodiments, the target nucleic acid is at least 10 contiguous nucleic acid molecules of SEQ ID NO: 2003 comprising a “A” or a “G” allele at nucleoposition 51 within SEQ ID NO: 2003. In some embodiments, detecting the at least 10 contiguous nucleic acid molecules comprising a “A” or a “G” allele at nucleoposition 51 within SEQ ID NO: 2003 is sufficient to detect the polymorphism at rs9305694.

[0084] In some embodiments, the target nucleic acid is at least 10 contiguous nucleic acid molecules of SEQ ID NO: 2004 comprising a non-reference allele at nucleoposition 51 within SEQ ID NO: 2004. In some embodiments, the target nucleic acid is at least 10 contiguous nucleic acid molecules of SEQ ID NO: 2004 comprising a “A” or a “C” allele at nucleoposition 51 within SEQ ID NO: 2004. In some embodiments, detecting the at least 10 contiguous nucleic acid molecules comprising a “A” or a “C” allele at nucleoposition 51 within SEQ ID NO: 2004 is sufficient to detect the polymorphism at rs139009610.

[0085] In some embodiments, the target nucleic acid is at least 10 contiguous nucleic acid molecules of SEQ ID NO: 2005 comprising a non-reference allele at nucleoposition 51 within SEQ ID NO: 2005. In some embodiments, the target nucleic acid is at least 10 contiguous nucleic acid molecules of SEQ ID NO: 2005 comprising a “A” or an “C” allele at nucleoposition 51 within SEQ ID NO: 2005. In some embodiments, detecting the at least 10 contiguous nucleic acid molecules comprising a “A” or an “C” allele at nucleoposition 51 within SEQ ID NO: 2005 is sufficient to detect the polymorphism at rs28732100.

[0086] In some embodiments, the target nucleic acid is at least 10 contiguous nucleic acid molecules of SEQ ID NO: 2006 comprising a non-reference allele at nucleoposition 51 within SEQ ID NO: 2006. In some embodiments, the target nucleic acid is at least 10 contiguous nucleic acid molecules of SEQ ID NO: 2006 comprising a “A” or an “T” allele at nucleoposition 51 within SEQ ID NO: 2006. In some embodiments, detecting the at least 10 contiguous nucleic acid molecules comprising a “A” or an “T” allele at nucleoposition 51 within SEQ ID NO: 2006 is sufficient to detect the polymorphism at rs12199223.

[0087] In some embodiments, the target nucleic acid is at least 10 contiguous nucleic acid molecules of SEQ ID NO: 2007 comprising a non-reference allele at nucleoposition 51 within SEQ ID NO: 2007. In some embodiments, the target nucleic acid is at least 10 contiguous nucleic acid molecules of SEQ ID NO: 2007 comprising a “C” or a “G” allele at nucleoposition 51 within SEQ ID NO: 2007. In some embodiments, detecting the at least 10 contiguous nucleic acid molecules comprising a “C” or a “G” allele at nucleoposition 51 within SEQ ID NO: 2007 is sufficient to detect the polymorphism at rs1265181.

[0088] In some embodiments, the target nucleic acid is at least 10 contiguous nucleic acid molecules of SEQ ID NO: 2008 comprising a non-reference allele at nucleoposition 51 within SEQ ID NO: 2008. In some embodiments, the target nucleic acid is at least 10 contiguous nucleic acid molecules of SEQ ID NO: 2008 comprising a “A” or an “T” allele at nucleoposition 51 within SEQ ID NO: 2008. In some embodiments, detecting the at least 10 contiguous nucleic acid molecules comprising a “A” or an “T” allele at nucleoposition 51 within SEQ ID NO: 2008 is sufficient to detect the polymorphism at rs13417109.

[0089] In some embodiments, the target nucleic acid is at least 10 contiguous nucleic acid molecules of SEQ ID NO: 2009 comprising a non-reference allele at nucleoposition 51 within SEQ ID NO: 2009. In some embodiments, the target nucleic acid is at least 10 contiguous nucleic acid molecules of SEQ ID NO: 2009 comprising a “A”, “C” or an “T” allele at nucleoposition 51 within SEQ ID NO: 2009. In some embodiments, detecting the at least 10 contiguous nucleic acid molecules comprising a “A”, “C” or an “T” allele at nucleoposition 51 within SEQ ID NO: 2009 is sufficient to detect the polymorphism at rs17026757.

[0090] In some embodiments, the target nucleic acid is at least 10 contiguous nucleic acid molecules of SEQ ID NO: 2010 comprising a non-reference allele at nucleoposition 51 within SEQ ID NO: 2010. In some embodiments, the target nucleic acid is at least 10 contiguous nucleic acid molecules of SEQ ID NO: 2010 comprising a C” or an “T” allele at nucleoposition 51 within SEQ ID NO: 2010. In some embodiments, detecting the at least 10 contiguous nucleic acid molecules comprising a “C” or an “T” allele at nucleoposition 51 within SEQ ID NO: 2010 is sufficient to detect the polymorphism at rs117670930.

[0091] In some embodiments, the target nucleic acid is at least 10 contiguous nucleic acid molecules of SEQ ID NO: 2011 comprising a non-reference allele at nucleoposition 51 within SEQ ID NO: 2011. In some embodiments, the target nucleic acid is at least 10 contiguous nucleic acid molecules of SEQ ID NO: 2011 comprising a “T” or a “G” allele at nucleoposition 51 within SEQ ID NO: 2011. In some embodiments, detecting the at least 10 contiguous nucleic acid molecules comprising a “T” or a “G” allele at nucleoposition 51 within SEQ ID NO: 2011 is sufficient to detect the polymorphism at rs115994059.

[0092] In some embodiments, the target nucleic acid is at least 10 contiguous nucleic acid molecules of SEQ ID NO: 2012 comprising a non-reference allele at nucleoposition 51 within SEQ ID NO: 2012. In some embodiments, the target nucleic acid is at least 10 contiguous nucleic acid molecules of SEQ ID NO: 2012 comprising a “A” or a “G” allele at nucleoposition 51 within SEQ ID NO: 2012. In some embodiments, detecting the at least 10 contiguous nucleic acid molecules comprising a “A” or a “G” allele at nucleoposition 51 within SEQ ID NO: 2012 is sufficient to detect the polymorphism at rs7297515.

[0093] In some embodiments, the target nucleic acid is at least 10 contiguous nucleic acid molecules of SEQ ID NO: 2013 comprising a non-reference allele at nucleoposition 51 within SEQ ID NO: 2013. In some embodiments, the target nucleic acid is at least 10 contiguous nucleic acid molecules of SEQ ID NO: 2013 comprising a “A”, “C” or a “G” allele at nucleoposition 51 within SEQ ID NO: 2013. In some embodiments, detecting the at least 10 contiguous nucleic acid molecules comprising a “A”, “C” or a “G” allele at nucleoposition 51 within SEQ ID NO: 2013 is sufficient to detect the polymorphism at rs9305694.

[0094] In some embodiments, the target nucleic acid is at least 10 contiguous nucleic acid molecules of SEQ ID NO: 2014 comprising a non-reference allele at nucleoposition 51 within SEQ ID NO: 2014. In some embodiments, the target nucleic acid is at least 10 contiguous nucleic acid molecules of SEQ ID NO: 2014 comprising a “A” or a “T” allele at nucleoposition 51 within SEQ ID NO: 2014. In some embodiments, detecting the at least 10 contiguous nucleic acid molecules comprising a “A” or a “T” allele at nucleoposition 51 within SEQ ID NO: 2014 is sufficient to detect the polymorphism at rs62376929.

[0095] In some embodiments, the target nucleic acid is at least 10 contiguous nucleic acid molecules of SEQ ID NO: 2015 comprising a non-reference allele at nucleoposition 51 within SEQ ID NO: 2015. In some embodiments, the target nucleic acid is at least 10 contiguous nucleic acid molecules of SEQ ID NO: 2015 comprising a “C” or an “T” allele at nucleoposition 51 within SEQ ID NO: 2015. In some embodiments, detecting the at least 10 contiguous nucleic acid molecules comprising a “C” or an “T” allele at nucleoposition 51 within SEQ ID NO: 2015 is sufficient to detect the polymorphism at rs4418214.

[0096] In some embodiments, the target nucleic acid is at least 10 contiguous nucleic acid molecules of SEQ ID NO: 2016 comprising a non-reference allele at nucleoposition 51 within SEQ ID NO: 2016. In some embodiments, the target nucleic acid is at least 10 contiguous nucleic acid molecules of SEQ ID NO: 2016 comprising a “G” or an “T” allele at nucleoposition 51 within SEQ ID NO: 2016. In some embodiments, detecting the at least 10 contiguous nucleic acid molecules comprising a “G” or an “T” allele at nucleoposition 51 within SEQ ID NO: 2016 is sufficient to detect the polymorphism at rs3819299.

[0097] In some embodiments, the target nucleic acid is at least 10 contiguous nucleic acid molecules of SEQ ID NO: 2017 comprising a non-reference allele at nucleoposition 51 within SEQ ID NO: 2017. In some embodiments, the target nucleic acid is at least 10 contiguous nucleic acid molecules of SEQ ID NO: 2017 comprising a “A”, “C” or a “G” allele at nucleoposition 51 within SEQ ID NO: 2017. In some embodiments, detecting the at least 10 contiguous nucleic acid molecules comprising a “A”, “C” or a “G” allele at nucleoposition 51 within SEQ ID NO: 2017 is sufficient to detect the polymorphism at rs2373969.

[0098] In some embodiments, the target nucleic acid is at least 10 contiguous nucleic acid molecules of SEQ ID NO: 2018 comprising a non-reference allele at nucleoposition 51 within SEQ ID NO: 2018. In some embodiments, the target nucleic acid is at least 10 contiguous nucleic acid molecules of SEQ ID NO: 2018 comprising a “A”, “T” or a “G” allele at nucleoposition 51 within SEQ ID NO: 2018. In some embodiments, detecting the at least 10 contiguous nucleic acid molecules comprising a “A”, “T” or a “G” allele at nucleoposition 51 within SEQ ID NO: 2018 is sufficient to detect the polymorphism at rs4151651.

[0099] In some embodiments, the target nucleic acid is at least 10 contiguous nucleic acid molecules of SEQ ID NO: 2019 comprising a non-reference allele at nucleoposition 51 within SEQ ID NO: 2019. In some embodiments, the target nucleic acid is at least 10 contiguous nucleic acid molecules of SEQ ID NO: 2019 comprising a “A”, “T” or a “G” allele at nucleoposition 51 within SEQ ID NO: 2019. In some embodiments, detecting the at least 10 contiguous nucleic acid molecules comprising a “A”, “T” or a “G” allele at nucleoposition 51 within SEQ ID NO: 2019 is sufficient to detect the polymorphism at rs9366775.

[0100] In some embodiments, the target nucleic acid is at least 10 contiguous nucleic acid molecules of SEQ ID NO: 2020 comprising a non-reference allele at nucleoposition 51 within SEQ ID NO: 2020. In some embodiments, the target nucleic acid is at least 10 contiguous nucleic acid molecules of SEQ ID NO: 2020 comprising a C” or an “A” allele at nucleoposition 51 within SEQ ID NO: 2020. In some embodiments, detecting the at least 10 contiguous nucleic acid molecules comprising a “C” or an “A” allele at nucleoposition 51 within SEQ ID NO: 2020 is sufficient to detect the polymorphism at rs2858884.

[0101] In some embodiments, the target nucleic acid is at least 10 contiguous nucleic acid molecules of SEQ ID NO: 2021 comprising a non-reference allele at nucleoposition 51 within SEQ ID NO: 2021. In some embodiments, the target nucleic acid is at least 10 contiguous nucleic acid molecules of SEQ ID NO: 2021 comprising a “C”, “T” or a “G” allele at nucleoposition 51 within SEQ ID NO: 2021. In some embodiments, detecting the at least 10 contiguous nucleic acid molecules comprising a “C”, “T” or a “G” allele at nucleoposition 51 within SEQ ID NO: 2021 is sufficient to detect the polymorphism at rs2858319.

[0102] In some embodiments, the target nucleic acid is at least 10 contiguous nucleic acid molecules of SEQ ID NO: 2022 comprising a non-reference allele at nucleoposition 51 within SEQ ID NO: 2022. In some embodiments, the target nucleic acid is at least 10 contiguous nucleic acid molecules of SEQ ID NO: 2022 comprising a “C”, “T” or a “G” allele at nucleoposition 51 within SEQ ID NO: 2022. In some embodiments, detecting the at least 10 contiguous nucleic acid molecules comprising a “C”, “T” or a “G” allele at nucleoposition 51 within SEQ ID NO: 2022 is sufficient to detect the polymorphism at rs6917611.

[0103] In some embodiments, the target nucleic acid is at least 10 contiguous nucleic acid molecules of SEQ ID NO: 2023 comprising a non-reference allele at nucleoposition 51 within SEQ ID NO: 2023. In some embodiments, the target nucleic acid is at least 10 contiguous nucleic acid molecules of SEQ ID NO: 2023 comprising a “T” or a “G” allele at nucleoposition 51 within SEQ ID NO: 2023. In some embodiments, detecting the at least 10 contiguous nucleic acid molecules comprising a “T” or a “G” allele at nucleoposition 51 within SEQ ID NO: 2023 is sufficient to detect the polymorphism at rs6930571.

[0104] In some embodiments, the target nucleic acid is at least 10 contiguous nucleic acid molecules of SEQ ID NO: 2024 comprising a non-reference allele at nucleoposition 51 within SEQ ID NO: 2024. In some embodiments, the target nucleic acid is at least 10 contiguous nucleic acid molecules of SEQ ID NO: 2024 comprising a “T” or a “C” allele at nucleoposition 51 within SEQ ID NO: 2024. In some embodiments, detecting the at least 10 contiguous nucleic acid molecules comprising a “T” or a “C” allele at nucleoposition 51 within SEQ ID NO: 2024 is sufficient to detect the polymorphism at rs389419.

[0105] In some embodiments, the target nucleic acid is at least 10 contiguous nucleic acid molecules of SEQ ID NO: 2025 comprising a non-reference allele at nucleoposition 51 within SEQ ID NO: 2025. In some embodiments, the target nucleic acid is at least 10 contiguous nucleic acid molecules of SEQ ID NO: 2025 comprising a “G” or an “T” allele at nucleoposition 51 within SEQ ID NO: 2025. In some embodiments, detecting the at least 10 contiguous nucleic acid molecules comprising a “G” or an “T” allele at nucleoposition 51 within SEQ ID NO: 2025 is sufficient to detect the polymorphism at rs76558762.

[0106] In some embodiments, the target nucleic acid is at least 10 contiguous nucleic acid molecules of SEQ ID NO: 2026 comprising a non-reference allele at nucleoposition 51 within SEQ ID NO: 2026. In some embodiments, the target nucleic acid is at least 10 contiguous nucleic acid molecules of SEQ ID NO: 2026 comprising a “C”, “T” or a “G” allele at nucleoposition 51 within SEQ ID NO: 2026. In some embodiments, detecting the at least 10 contiguous nucleic acid molecules comprising a “C”, “T” or a “G” allele at nucleoposition 51 within SEQ ID NO: 2026 is sufficient to detect the polymorphism at rs7956721.

[0107] In some embodiments, the target nucleic acid is at least 10 contiguous nucleic acid molecules of SEQ ID NO: 2027 comprising a non-reference allele at nucleoposition 51 within SEQ ID NO: 2027. In some embodiments, the target nucleic acid is at least 10 contiguous nucleic acid molecules of SEQ ID NO: 2027 comprising a “A”, “G”, “T” or a “C” allele at nucleoposition 51 within SEQ ID NO: 2027. In some embodiments, detecting the at least 10 contiguous nucleic acid molecules comprising a “A”, “G”, “T” or a “C” allele at nucleoposition 51 within SEQ ID NO: 2027 is sufficient to detect the polymorphism at rs887864.

[0108] In some embodiments, the target nucleic acid is at least 10 contiguous nucleic acid molecules of SEQ ID NO: 2028 comprising a non-reference allele at nucleoposition 51 within SEQ ID NO: 2028. In some embodiments, the target nucleic acid is at least 10 contiguous nucleic acid molecules of SEQ ID NO: 2028 comprising a “A”, “C”, “T” or a “G” allele at nucleoposition 51 within SEQ ID NO: 2028. In some embodiments, detecting the at least 10 contiguous nucleic acid molecules comprising a “A”, “C”, “T” or a “G” allele at nucleoposition 51 within SEQ ID NO: 2028 is sufficient to detect the polymorphism at rs9276424.

[0109] In some embodiments, the target nucleic acid is at least 10 contiguous nucleic acid molecules of SEQ ID NO: 2029 comprising a non-reference allele at nucleoposition 51 within SEQ ID NO: 2029. In some embodiments, the target nucleic acid is at least 10 contiguous nucleic acid molecules of SEQ ID NO: 2029 comprising a “G” or an “A” allele at nucleoposition 51 within SEQ ID NO: 2029. In some embodiments, detecting the at least 10 contiguous nucleic acid molecules comprising a “G” or an “A” allele at nucleoposition 51 within SEQ ID NO: 2029 is sufficient to detect the polymorphism at rs10056322.

[0110] In some embodiments, the target nucleic acid is at least 10 contiguous nucleic acid molecules of SEQ ID NO: 2030 comprising a non-reference allele at nucleoposition 51 within SEQ ID NO: 2030. In some embodiments, the target nucleic acid is at least 10 contiguous nucleic acid molecules of SEQ ID NO: 2030 comprising a “C”, “T” or an “A” allele at nucleoposition 51 within SEQ ID NO: 2030. In some embodiments, detecting the at least 10 contiguous nucleic acid molecules comprising a “C”, “T” or an “A” allele at nucleoposition 51 within SEQ ID NO: 2030 is sufficient to detect the polymorphism at rs6461986.

[0111] In some embodiments, the target nucleic acid is at least 10 contiguous nucleic acid molecules of SEQ ID NO: 2031 comprising a non-reference allele at nucleoposition 51 within SEQ ID NO: 2031. In some embodiments, the target nucleic acid is at least 10 contiguous nucleic acid molecules of SEQ ID NO: 2031 comprising a “A”, “G” or a “C” allele at nucleoposition 51 within SEQ ID NO: 2031. In some embodiments, detecting the at least 10 contiguous nucleic acid molecules comprising a “A”, “G” or a “C” allele at nucleoposition 51 within SEQ ID NO: 2031 is sufficient to detect the polymorphism at rs13421864.

[0112] In some embodiments, one target nucleic acid (e.g., a polymorphism) is detected with the methods disclosed herein. In some embodiments, at least 2, 3, 4, 5, 6, 7, 8, 9, or 10 target nucleic acids are detected. In some embodiments, the at least 2, 3, 4, 5, 6, 7, 8, 9, or 10 target nucleic acids are detected in a single multiplexed assay. In some embodiments, when 4 target nucleic acids are detected in a sample from subject, 4 unique 3-polymorphism combinations are measured. In a non-limiting example, a sample (e.g., blood or plasma) obtained from a subject is contacted by 4 primer pairs, each primer pair individually adapted to amplify rs6905036, rs2844510, rs2516514, and rs17030062, respectively. A positive, negative, or indeterminate profile may depend, at least in part, on which of the 3-polymorphism combinations is detected in the sample, and/or whether the genotype is heterozygous or homozygous for the polymorphism. In this example, assaying 4 polymorphism means a total of 4 unique 3-polymorphisms may be detected in the patient sample, which are rs2516514, rs17030062, rs9305694, rs139009610, rs28732100, rs12199223, rs1265181, rs13417109, rs17026757, rs117670930, rs115994059, rs7297515, rs13166683, rs62376929, rs4418214, rs3819299, rs2373969, rs4151651, rs9366775, rs2858884, rs2858319, rs6917611, rs6930571, rs389419, rs76558762, rs7956721, rs887864, rs9276424, rs10056322, rs6461986, and rs13421864. Each polymorphism detected may be heterozygous or homozygous.

[0113] To practice the methods and systems provided herein, genetic material may be extracted from a sample obtained from a subject, e.g., a sample of blood or serum. In certain embodiments where nucleic acids are extracted, the nucleic acids are extracted using any technique that does not interfere with subsequent analysis. In certain embodiments, this technique uses alcohol precipitation using ethanol, methanol or isopropyl alcohol. In certain embodiments, this technique uses phenol, chloroform, or any combination thereof. In certain embodiments, this technique uses cesium chloride. In certain embodiments, this technique uses sodium, potassium or ammonium acetate or any other salt commonly used to precipitate DNA. In certain embodiments, this technique utilizes a column or resin based nucleic acid purification scheme such as those commonly sold commercially, one non-limiting example would be the GenElute Bacterial Genomic DNA Kit available from Sigma Aldrich. In certain embodiments, after extraction the nucleic acid is stored in water, Tris buffer, or Tris-EDTA buffer before subsequent analysis. In an exemplary embodiment, the nucleic acid material is extracted in water. In some cases, extraction does not comprise nucleic acid purification. In certain embodiments, RNA may be extracted from cells using RNA extraction techniques including, for example, using acid phenol/guanidine isothiocyanate extraction (RNAzol B; Biogenesis), RNeasy RNA preparation kits (Qiagen) or PAXgene (PreAnalytix, Switzerland).

[0114] In some embodiments, methods of detecting a presence, absence, or level of a target protein (e.g., biomarker) in the sample obtained from the subject involve detecting protein activity or expression. In some embodiments, the target protein is TL1A, or a binding partner of TL1A such as Death Domain Receptor 3 (DcR3). A target protein may be detected by use of an antibody-based assay, where an antibody specific to the target protein is utilized. In some embodiments, antibody-based detection methods utilize an antibody that binds to any region of target protein. An exemplary method of analysis comprises performing an enzyme-linked immunosorbent assay (ELISA). The ELISA assay may be a sandwich ELISA or a direct ELISA. Another exemplary method of analysis comprises a single molecule array, e.g., Simoa. Other exemplary methods of detection include immunohistochemistry and lateral flow assay. Additional exemplary methods for detecting target protein include, but are not limited to, gel electrophoresis, capillary electrophoresis, high performance liquid chromatography (HPLC), thin layer chromatography (TLC), hyperdiffusion chromatography, and the like, or various immunological methods such as fluid or gel precipitation reactions, immunodiffusion (single or double), immunoelectrophoresis, radioimmunoassay (RIA), immunofluorescent assays, and Western blotting. In some embodiments, antibodies, or antibody fragments, are used in methods such as Western blots or immunofluorescence techniques to detect the expressed proteins. The antibody or protein can be immobilized on a solid support for Western blots and immunofluorescence techniques. Suitable solid phase supports or carriers include any support capable of binding an antigen or an antibody. Exemplary supports or carriers include glass, polystyrene, polypropylene, polyethylene, dextran, nylon, amylases, natural and modified celluloses, polyacrylamides, gabbros, and magnetite.

[0115] In some cases, a target protein may be detected by detecting binding between the target protein and a binding partner of the target protein. Non-limiting examples of binding partners to TL1A include DcR3, and Tumor necrosis factor receptor superfamily member 25 (TNR25). Exemplary methods of analysis of protein-protein binding comprise performing an assay in vivo or in vitro, or ex vivo. In some instances, the method of analysis comprises an assay such as a co-immunoprecipitation (co-IP), pull-down, crosslinking protein interaction analysis, labeled transfer protein interaction analysis, or Far-western blot analysis, FRET based assay, including, for example FRET-FLIM, a yeast two-hybrid assay, BiFC, or split luciferase assay.

[0116] Disclosed herein are methods of detecting a presence or a level of one or more serological markers in a sample obtained from a subject. In some embodiments, the one or more serological markers comprises anti-Saccharomyces cerevisiae antibody (ASCA), an anti-neutrophil cytoplasmic antibody (ANCA), antibody against E. coli outer membrane porin protein C (anti-OmpC), anti-chitin antibody, pANCA antibody, anti-I2 antibody, and anti-Cbirl flagellin antibody. In some embodiments, the antibodies comprises immunoglobulin A (IgA), immunoglobulin G (IgG), immunoglobulin E (IgE), or immunoglobulin M (IgM), immunoglobulin D (IgD), or a combination thereof. Any suitable method for detecting a target protein or biomarker disclosed herein may be used to detect a presence, absence, or level of a serological marker. In some embodiments, the presence or the level of the one or more serological markers is detected using an enzyme-linked immunosorbent assay (ELISA), a single molecule array (Simoa), immunohistochemistry, internal transcribed spacer (ITS) sequencing, or any combination thereof. In some embodiments, the ELISA is a fixed leukocyte ELISA. In some embodiments, the ELISA is a fixed neutrophil ELISA. A fixed leukocyte or neutrophil ELISA may be useful for the detection of certain serological markers, such as those described in Saxon et al., A distinct subset of antineutrophil cytoplasmic antibodies is associated with inflammatory bowel disease, J. Allergy Clin. Immuno. 86:2; 202-210 (August 1990). In some embodiments, ELISA units (EU) are used to measure positivity of a presence or level of a serological marker (e.g., seropositivity), which reflects a percentage of a standard or reference value. In some embodiments, the standard comprises pooled sera obtained from well-characterized patient population (e.g., diagnosed with the same disease or condition the subject has, or is suspected of having) reported as being seropositive for the serological marker of interest. In some embodiments, the control or reference value comprises 10, 20, 30, 40, 50, 60, 70, 80, 90, or 100 EU. In some instances, a quartile sum scores are calculated using, for example, the methods reported in Landers C J, Cohavy O, Misra R. et al., Selected loss of tolerance evidenced by Crohn's disease-associated immune responses to auto- and microbial antigens. Gastroenterology (2002)123:689-699.

### Extra-Intestinal Manifestations

[0117] Inflammatory Bowel Disease may cause symptoms outside of the gut. Symptoms of inflammatory bowel disease that occur outside of the gastrointestinal system are referred to as extra-intestinal manifestations (EIMs). 25%-40% of IBD patients experience EIMs. In some embodiments, the EIM may be present in a tissue selected from the group consisting of a joint, skin, bone, eye, kidney, or liver. In some embodiments, the EIM comprises ankylosing spondylitis, sacroiliitis, erythema nodosum, pyoderma gangrenosum, psoriasis, a manifestation in the eye, primary sclerosing cholangitis, or peripheral arthritis, or a combination thereof.

[0118] In some embodiments, the EIM comprises ankylosing spondylitis and sacroiliitis. In some embodiments, the therapeutic agent comprises an anti-TL1A antibody, anti-CD30L antibody, glucocorticosteroid, anti-TNF therapy, anti-a4-b7 therapy (e.g., vedolizumab), anti-IL12p40 therapy (e.g., ustekinumab), JAK inhibitor (e.g., tofacitinib), thalidomide, or cyclophosphamide (Cytoxan), or a combination thereof. In some embodiments, the therapeutic agent comprises etanercept (e.g., Enbrel), adalimumab (e.g., Humira), infliximab (e.g., Remicade), cyclobenzaprine, a steroid, secukinumab (e.g., Cosentyx), methotrexate, leflunomide (e.g., Arava), hydroxychloroquine, or sulfasalazine (e.g., Azulfidine), or a combination thereof. In some embodiments, the therapeutic agent comprises an anti-TL1A antibody as described herein. In some embodiments, the therapeutic agent comprises an anti-CD30L antibody as described herein. In some embodiments, the therapeutic agent comprises a glucocorticosteroid. In some embodiments, the therapeutic agent comprises anti-TNF therapy. In some embodiments, the therapeutic agent comprises anti-a4-b7 therapy. In some embodiments, the therapeutic agent comprises a JAK inhibitor. In some embodiments, the therapeutic agent comprises thalidomide. In some embodiments, the therapeutic agent comprises cyclophosphamide. In some embodiments, the therapeutic agent comprises adalimumab. In some embodiments, the therapeutic agent comprises etanercept. In some embodiments, the therapeutic agent comprises infliximab. In some embodiments, the therapeutic agent comprises cyclobenzaprine. In some embodiments, the therapeutic agent comprises a steroid. In some embodiments, the therapeutic agent comprises secukinumab. In some embodiments, the therapeutic agent comprises methotrexate. In some embodiments, the therapeutic agent comprises leflunomide. In some embodiments, the therapeutic agent comprises hydroxychloroquine. In some embodiments, the therapeutic agent comprises sulfasalazine.

[0119] EIMs may manifest in the skin. In some embodiments, the EIM comprises erythema nodosum. In some embodiments, the EIM comprises pyoderma gangrenosum. In some embodiments, the EIM comprises psoriasis. In some embodiments, the EIM comprises erythema nodosum, pyoderma gangrenosum, and/or psoriasis. In some embodiments, the EIM comprises erythema nodosum, pyoderma gangrenosum, and psoriasis. In some embodiments, the EIM comprises erythema nodosum and the therapeutic agent comprises an anti-inflammatory drug, cortisone, colchicine, potassium iodine, a steroid, hydroxychloroquine (Plaquenil), cyclosporin A (Sandimmune), thalidomide (Thalomid), or a combination thereof. In some embodiments, the EIM comprises pyoderma gangrenosum and the therapeutic agent comprises a corticosteroid, a ciclosporin, infliximab, canakinumab, clobetasol, mupirocin, gentamicin, tacrolimus, mycophenolate mofetil; mycophenolate mofetil, thalidomide; or a combination thereof. In some embodiments, the EIM comprises psoriasis and the therapeutic agent comprises (apremilast), a steroid, a retinoid, methotrexate, adalimumab (Humira), brodalumab (Siliq), certolizumab pegol (Cimzia) etanercept (Enbrel), guselkumab (Tremfya), infliximab (Remicade), ixekizumab (Taltz), risankizumab-rzaa (SKYRIZI), secukinumab (Cosentyx), tildrakizumab (Ilumya), ustekinumab (Stelara), apremilast (Otezla), or a combination thereof. In some embodiments, the therapeutic agent comprises an anti-TL1A antibody, anti-CD30L antibody, glucocorticosteroid, anti-TNF therapy, anti-a4-b7 therapy (e.g., vedolizumab), anti-IL12p40 therapy (e.g., ustekinumab), JAK inhibitor (e.g., tofacitinib), thalidomide, or cyclophosphamide (Cytoxan), or a combination thereof. In some embodiments, the therapeutic agent comprises an anti-inflammatory drug, cortisone, colchicine, potassium iodine, steroid, hydroxychloroquine, cyclosporin A (e.g., Sandimmune), or thalidomide, or a combination thereof. In some embodiments, the therapeutic agent comprises a corticosteroid, a ciclosporin, infliximab (e.g., Remicade), canakinumab (e.g., Ilaris), clobetasol, mupirocin, gentamicin, tacrolimus, mycophenolate mofetil, or thalidomide, or a combination thereof. In some embodiments, the therapeutic agent comprises a steroid, retinoid, methotrexate, adalimumab (e.g., Humira), brodalumab (e.g., Siliq), certolizumab pegol (e.g., Cimzia) etanercept (e.g., Enbrel), guselkumab (e.g., Tremfya), infliximab (e.g., Remicade), ixekizumab (e.g., Taltz), risankizumab-rzaa (e.g., SKYRIZI), secukinumab (e.g., Cosentyx), tildrakizumab (e.g., Ilumya), ustekinumab (e.g., Stelara), or apremilast (e.g., Otezla), or a combination thereof. In some embodiments, the therapeutic agent comprises an anti-TL1A antibody as described herein. In some embodiments, the therapeutic agent comprises an anti-CD30L antibody as described herein. In some embodiments, the therapeutic agent comprises a glucocorticosteroid. In some embodiments, the therapeutic agent comprises anti-TNF therapy. In some embodiments, the therapeutic agent comprises anti-a4-b7 therapy. In some embodiments, the therapeutic agent comprises a JAK inhibitor. In some embodiments, the therapeutic agent comprises thalidomide. In some embodiments, the therapeutic agent comprises cyclophosphamide. In some embodiments, the therapeutic agent comprises an anti-inflammatory drug. In some embodiments, the therapeutic agent comprises ciclosporin. In some embodiments, the therapeutic agent comprises ciclosporin. In some embodiments, the therapeutic agent comprises a steroid. In some embodiments, the therapeutic agent comprises adalimumab. In some embodiments, the therapeutic agent comprises canakinumab. In some embodiments, the therapeutic agent comprises brodalumab. In some embodiments, the therapeutic agent comprises certolizumab pegol. In some embodiments, the therapeutic agent comprises clobetasol. In some embodiments, the therapeutic agent comprises colchicine. In some embodiments, the therapeutic agent comprises gentamicin. In some embodiments, the therapeutic agent comprises cortisone. In some embodiments, the therapeutic agent comprises gentamicin. In some embodiments, the therapeutic agent comprises guselkumab. In some embodiments, the therapeutic agent comprises hydroxychloroquine. In some embodiments, the therapeutic agent comprises ixekizumab. In some embodiments, the therapeutic agent comprises methotrexate. In some embodiments, the therapeutic agent comprises mupirocin. In some embodiments, the therapeutic agent comprises mycophenolate mofetil. In some embodiments, the therapeutic agent comprises potassium iodine. In some embodiments, the therapeutic agent comprises retinoid. In some embodiments, the therapeutic agent comprises secukinumab. In some embodiments, the therapeutic agent comprises risankizumab-rzaa. In some embodiments, the therapeutic agent comprises a steroid. In some embodiments, the therapeutic agent comprises tacrolimus. In some embodiments, the therapeutic agent comprises thalidomide. In some embodiments, the therapeutic agent comprises tildrakizumab. In some embodiments, the therapeutic agent comprises ustekinumab. In some embodiments, the therapeutic agent comprises apremilast. In some embodiments, the therapeutic agent comprises etanercept. In some embodiments, the therapeutic agent comprises thalidomide.

[0120] In some embodiments, the EIM comprises the manifestation in the eye. In some embodiments, the manifestation in the eye comprises uveitis, iritis, episcleritis, scleritis, or undiagnosed ocular inflammation, or a combination thereof. In some embodiments, the therapeutic agent comprises an anti-TL1A antibody, anti-CD30L antibody, glucocorticosteroid, anti-TNF therapy, anti-a4-b7 therapy (e.g., vedolizumab), anti-IL12p40 therapy (e.g., ustekinumab), JAK inhibitor (e.g., tofacitinib), thalidomide, or cyclophosphamide (Cytoxan), or a combination thereof. In some embodiments, wherein the therapeutic agent comprises a steroid, methotrexate, mycophenolate, sulfasalazine (e.g., Azulfidine), azathioprine (e.g., Imuran), cyclosporine, adalimumab (e.g., Humira), infliximab (e.g., Remicade), daclizumab (e.g., Zinbryta), abatacept (e.g., Orencia), or rituximab (e.g., Rituxan), or a combination thereof. In some embodiments, the therapeutic agent comprises an anti-TL1A antibody as described herein. In some embodiments, the therapeutic agent comprises an anti-CD30L antibody as described herein. In some embodiments, the therapeutic agent comprises a glucocorticosteroid. In some embodiments, the therapeutic agent comprises anti-TNF therapy. In some embodiments, the therapeutic agent comprises anti-a4-b7 therapy. In some embodiments, the therapeutic agent comprises a JAK inhibitor. In some embodiments, the therapeutic agent comprises thalidomide. In some embodiments, the therapeutic agent comprises cyclophosphamide. In some embodiments, the therapeutic agent comprises a steroid. In some embodiments, the therapeutic agent comprises methotrexate. In some embodiments, the therapeutic agent comprises mycophenolate. In some embodiments, the therapeutic agent comprises sulfasalazine. In some embodiments, the therapeutic agent comprises azathioprine. In some embodiments, the therapeutic agent comprises cyclosporine. In some embodiments, the therapeutic agent comprises adalimumab. In some embodiments, the therapeutic agent comprises infliximab. In some embodiments, the therapeutic agent comprises daclizumab. In some embodiments, the therapeutic agent comprises abatacept. In some embodiments the therapeutic agent comprises rituximab.

[0121] Primary sclerosing cholangitis (PSC) is a long-term progressive disease of the liver and gallbladder characterized by inflammation and scarring of the bile ducts which normally allow bile to drain from the gallbladder. In some embodiments, the EIM comprises primary sclerosing cholangitis. In some embodiments, the therapeutic agent comprises an anti-TL1A antibody, anti-CD30L antibody, glucocorticosteroid, anti-TNF therapy, anti-a4-b7 therapy (e.g., vedolizumab), anti-IL12p40 therapy (e.g., ustekinumab), JAK inhibitor (e.g., tofacitinib), thalidomide, or cyclophosphamide (Cytoxan), or a combination thereof. In some embodiments, the therapeutic agent comprises ursodeoxycholic acid (UDCA), antipruritic, cholestyramine, antibiotic, vitamin A, vitamin D, vitamin E, or vitamin K, or a combination thereof. In some embodiments, the therapeutic agent comprises an anti-TL1A antibody as described herein. In some embodiments, the therapeutic agent comprises an anti-CD30L antibody as described herein. In some embodiments, the therapeutic agent comprises a glucocorticosteroid. In some embodiments, the therapeutic agent comprises anti-TNF therapy. In some embodiments, the therapeutic agent comprises anti-a4-b7 therapy. In some embodiments, the therapeutic agent comprises a JAK inhibitor. In some embodiments, the therapeutic agent comprises thalidomide. In some embodiments, the therapeutic agent comprises cyclophosphamide. In some embodiments, the therapeutic agent comprises UDCA. In some embodiments, the therapeutic agent comprises antipruritic. In some embodiments, the therapeutic agent comprises cholestryamine. In some embodiments, the therapeutic agent comprises an antibiotic. In some embodiments, the therapeutic agent comprises vitamin A. In some embodiments, the therapeutic agent comprises vitamin D. In some embodiments, the therapeutic agent comprises vitamin E. In some embodiments, the therapeutic agent comprises vitamin K.

[0122] In some embodiments, the EIM comprises peripheral arthritis. In some embodiments, the arthritis comprises large joint arthritis, small joint arthritis, extracolonic arthritis, Crohn's disease/ulcerative colitis non-specific joint inflammation, JBD-associated arthralgia complication, or a combination thereof. In some embodiments, the therapeutic agent comprises an anti-TL1A antibody, anti-CD30L antibody, glucocorticosteroid, anti-TNF therapy, anti-a4-b7 therapy (e.g., vedolizumab), anti-IL12p40 therapy (e.g., ustekinumab), JAK inhibitor (e.g., tofacitinib), thalidomide, or cyclophosphamide (Cytoxan), or a combination thereof. In some embodiments, the therapeutic agent comprises methotrexate, leflunomide (e.g., Arava), hydroxychloroquine, sulfasalazine (e.g., Azulfidine), nonsteroidal anti-inflammatory drug (NSAID), TNF inhibitor, etanercept (e.g., Enbrel), infliximab (e.g., Remicade), belimumab (e.g., Benlysta), rituximab (e.g., Rituxan), anakinra (e.g., Kineret), tocilizumab (e.g., Actemra), canakinumab (e.g., Ilaris), secukinumab (e.g., Cosentyx), ustekinumab (e.g., Stelara), ixekizumab (e.g., Taltz), sarilumab (e.g., Kevzara), tofacitinib (e.g., XELJANZ), abatacept (e.g., Orencia), corticosteroid, prednisone, or cortisone, or a combination thereof. In some embodiments, the therapeutic agent comprises an anti-TL1A antibody as described herein. In some embodiments, the therapeutic agent comprises an anti-CD30L antibody as described herein. In some embodiments, the therapeutic agent comprises a glucocorticosteroid. In some embodiments, the therapeutic agent comprises anti-TNF therapy. In some embodiments, the therapeutic agent comprises anti-a4-b7 therapy. In some embodiments, the therapeutic agent comprises a JAK inhibitor. In some embodiments, the therapeutic agent comprises thalidomide. In some embodiments, the therapeutic agent comprises cyclophosphamide. In some embodiments, the therapeutic agent comprises methotrexate. In some embodiments, the therapeutic agent comprises leflunomide. In some embodiments, the therapeutic agent comprises hydroxychloroquine. In some embodiments, the therapeutic agent comprises sulfasalazine. In some embodiments, the therapeutic agent comprises NSAID. In some embodiments, the therapeutic agent comprises TNF inhibitor. In some embodiments, the therapeutic agent comprises etanercept. In some embodiments, the therapeutic agent comprises infliximab. In some embodiments, the therapeutic agent comprises belimumab. In some embodiments, the therapeutic agent comprises rituximab. In some embodiments, the therapeutic agent comprises anakinra. In some embodiments, the therapeutic agent comprises tocilizumab. In some embodiments, the therapeutic agent comprises canakinumab. In some embodiments, the therapeutic agent comprises secukinumab. In some embodiments, the therapeutic agent comprises ixekizumab. In some embodiments, the therapeutic agent comprises sarilumab. In some embodiments, the therapeutic agent comprises ustekinumab. In some embodiments, the therapeutic agent comprises tofacitinib. In some embodiments, the therapeutic agent comprises abatacept. In some embodiments, the therapeutic agent comprises cortisone. In some embodiments, the therapeutic agent comprises a corticosteroid. In some embodiments, the therapeutic agent comprises prednisone.

[0123] In some embodiments, wherein the EIM comprises ankylosing spondylitis, sacroiliitis, erythema nodosum, pyoderma gangrenosum, psoriasis, a manifestation in the eye, or primary sclerosing cholangitis, or a combination thereof. In some embodiments, the EIM comprises ankylosing spondylitis, sacroiliitis, erythema nodosum, pyoderma gangrenosum, psoriasis, eye, and primary sclerosing cholangitis. In some embodiments, the EIM comprises ankylosing spondylitis, sacroiliitis, erythema nodosum, pyoderma gangrenosum, psoriasis, eye, peripheral arthritis, or primary sclerosing cholangitis, or a combination thereof. In some embodiments, the EIM comprises ankylosing spondylitis, sacroiliitis, erythema nodosum, pyoderma gangrenosum, psoriasis, eye, peripheral arthritis, and primary sclerosing cholangitis.

### Methods of Treatment

[0124] Disclosed herein are methods of treating a disease or condition, or a symptom of the disease or condition, in a subject, comprising administrating of therapeutic effective amount of one or more therapeutic agents to the subject. In some embodiments, the one or more therapeutic agents is administered to the subject alone (e.g., standalone therapy). In some embodiments, the one or more therapeutic agents is administered in combination with an additional agent. In some embodiments, the therapeutic agent is a first-line therapy for the disease or condition. In some embodiments, the therapeutic agent is a second-line, third-line, or fourth-line therapy, for the disease or condition.

[0125] A. Therapeutic Agents

[0126] In one aspect, provided herein are antibodies and antigen-binding fragments for treatment of IBD and/or an EIM of IBD. In some embodiments, an antibody comprises an antigen-binding fragment that refers to a portion of an antibody having antigenic determining variable regions of an antibody. Examples of antigen-binding fragments include, but are not limited to, Fab, Fab′, F(ab′)₂, and Fv fragments, linear antibodies, single chain antibodies, and multispecific antibodies formed from antibody fragments. In some embodiments, an antibody refers to an immunoglobulin molecule that recognizes and specifically binds to a target, such as a protein, polypeptide, peptide, carbohydrate, polynucleotide, lipid, or combinations of the foregoing through at least one antigen recognition site within the variable region of the immunoglobulin molecule. In some embodiments, an antibody includes intact polyclonal antibodies, intact monoclonal antibodies, antibody fragments (such as Fab, Fab′, F(ab′)₂, and Fv fragments), single chain Fv (scFv) mutants, a CDR-grafted antibody, multispecific antibodies, chimeric antibodies, humanized antibodies, human antibodies, fusion proteins comprising an antigen determination portion of an antibody, and any other modified immunoglobulin molecule comprising an antigen recognition site so long as the antibodies exhibit the desired biological activity. An antibody can be of any the five major classes of immunoglobulins: IgA, IgD, IgE, IgG, and IgM, or subclasses (isotypes) thereof (e.g. IgG1, IgG2, IgG3, IgG4, IgA1 and IgA2), based on the identity of their heavy-chain constant domains referred to as alpha, delta, epsilon, gamma, and mu, respectively. The different classes of immunoglobulins have different and well-known subunit structures and three-dimensional configurations. Antibodies can be naked or conjugated to other molecules such as toxins, radioisotopes, etc.

[0127] In some embodiments, a humanized antibody refers to forms of non-human (e.g., murine) antibodies having specific immunoglobulin chains, chimeric immunoglobulins, or fragments thereof that contain minimal non-human (e.g., murine) sequences. In a non-limiting example, a humanized antibody comprises less than about 40% non-human sequence in the variable region. In some cases, a humanized antibody comprises less than about 20% non-human sequence in a full-length antibody sequence. In a further non-limiting example, a humanized antibody comprises less than about 20% non-human sequence in the framework region of each of the heavy chain and light chain variable regions. For instance, the humanized antibody comprises less than about 20%, 19%, 18%, 17%, 16%, 15%, 14%, 13%, 12%, 11%, 10%, 9%, 8%, 7%, 6%, 5%, 4%, 3%, 2%, or 1% non-human sequence in the framework region of each of the heavy chain and light chain variable regions. As another example, the humanized antibody comprises about or less than about 15, 14, 13, 12, 11, 10, 9, 8, 7, 6, 5, 4, 3, 2, or 1 non-human sequences in the framework region of each of the heavy chain and light chain variable regions. In some cases, humanized antibodies are human immunoglobulins in which residues from the complementarity determining region (CDR) are replaced by residues from the CDR of a non-human species (e.g., mouse, rat, rabbit, hamster) that have the desired specificity, affinity, and capability. These humanized antibodies may contain one or more non-human species mutations, e.g., the heavy chain comprises about 1, 2, 3, 4, 5, 6, 7, 8, 9, 10, 11, 12, 13, 14, or 15 non-human species mutations in the framework region, and the light chain comprises about 1, 2, 3, 4, 5, 6, 7, 8, 9, 10, 11, 12, 13, 14, or 15 non-human species mutations in the framework region. The humanized heavy chain variable domain may comprise IGHV1-46*02 framework with no or fewer than about 10, 9, 8, 7, 6, 5, 4, 3, 2, or 1 amino acid mutations. The humanized light chain variable domain may comprise IGKV3-20 framework with no or fewer than about 10, 9, 8, 7, 6, 5, 4, 3, 2, or 1 amino acid mutations.

[0128] The terms “complementarity determining region,” and “CDR,” which are synonymous with “hypervariable region” or “HVR,” are known in the art to refer to non-contiguous sequences of amino acids within antibody variable regions, which confer antigen specificity and/or binding affinity. In general, there are three CDRs in each heavy chain variable region (CDR-H1, CDR-H2, CDR-H3) and three CDRs in each light chain variable region (CDR-L1, CDR-L2, CDR-L3). “Framework regions” and “FR” are known in the art to refer to the non-CDR portions of the variable regions of the heavy and light chains. In general, there are four FRs in each full-length heavy chain variable region (FR-H1, FR-H2, FR-H3, and FR-H4), and four FRs in each full-length light chain variable region (FR-L1, FR-L2, FR-L3, and FR-L4). The precise amino acid sequence boundaries of a given CDR or FR can be readily determined using any of a number of well-known schemes, including those described by Kabat et al. (1991), “Sequences of Proteins of Immunological Interest,” 5th Ed. Public Health Service, National Institutes of Health, Bethesda, Md. (“Kabat” numbering scheme), Al-Lazikani et al., (1997) JMB 273,927-948 (“Chothia” numbering scheme); MacCallum et al., J. Mol. Biol. 262:732-745 (1996), “Antibody-antigen interactions: Contact analysis and binding site topography,” J. Mol. Biol. 262, 732-745.” (“Contact” numbering scheme); Lefranc M P et al., “IMGT unique numbering for immunoglobulin and T cell receptor variable domains and Ig superfamily V-like domains,” Dev Comp Immunol, 2003 January; 27(1):55-77 (“IMGT” numbering scheme); Honegger A and Pluckthun A, “Yet another numbering scheme for immunoglobulin variable domains: an automatic modeling and analysis tool,” J Mol Biol, 2001 Jun. 8; 309(3):657-70, (“Aho” numbering scheme); and Whitelegg N R and Rees A R, “WAM: an improved algorithm for modelling antibodies on the WEB,” Protein Eng. 2000 December; 13(12):819-24 (“AbM” numbering scheme. In certain embodiments, the CDRs of the antibodies described herein can be defined by a method selected from Kabat, Chothia, IMGT, Aho, AbM, or combinations thereof.

[0129] In some embodiments, an antibody that specifically binds to a protein indicates that the antibody reacts or associates more frequently, more rapidly, with greater duration, with greater affinity, or with some combination of the above to the protein than with alternative substances, including unrelated proteins.

[0130] In some embodiments, the terms “polypeptide,” “peptide,” and “protein” are used interchangeably herein to refer to polymers of amino acids of any length. The polymer may be linear or branched, it may comprise modified amino acids, and it may be interrupted by non-amino acids. The terms also encompass an amino acid polymer that has been modified naturally or by intervention; for example, disulfide bond formation, glycosylation, lipidation, acetylation, phosphorylation, or any other manipulation or modification, such as fusion with another polypeptide and/or conjugation, e.g., with a labeling component. Also included within the definition are, for example, polypeptides containing one or more analogs of an amino acid (for example, unnatural amino acids, etc.), as well as other modifications known in the art.

[0131] Percent (%) sequence identity with respect to a reference polypeptide sequence is the percentage of amino acid residues in a candidate sequence that are identical with the amino acid residues in the reference polypeptide sequence, after aligning the sequences and introducing gaps, if necessary, to achieve the maximum percent sequence identity, and not considering any conservative substitutions as part of the sequence identity. Alignment for purposes of determining percent amino acid sequence identity can be achieved in various ways that are known for instance, using publicly available computer software such as BLAST, BLAST-2, ALIGN or Megalign (DNASTAR) software. Appropriate parameters for aligning sequences are able to be determined, including algorithms needed to achieve maximal alignment over the full length of the sequences being compared. For purposes herein, however, % amino acid sequence identity values are generated using the sequence comparison computer program ALIGN-2. The ALIGN-2 sequence comparison computer program was authored by Genentech, Inc., and the source code has been filed with user documentation in the U.S. Copyright Office, Washington D.C., 20559, where it is registered under U.S. Copyright Registration No. TXU510087. The ALIGN-2 program is publicly available from Genentech, Inc., South San Francisco, Calif., or may be compiled from the source code. The ALIGN-2 program should be compiled for use on a UNIX operating system, including digital UNIX V4.OD. All sequence comparison parameters are set by the ALIGN-2 program and do not vary.

[0132] In situations where ALIGN-2 is employed for amino acid sequence comparisons, the % amino acid sequence identity of a given amino acid sequence A to, with, or against a given amino acid sequence B (which can alternatively be phrased as a given amino acid sequence A that has or comprises a certain % amino acid sequence identity to, with, or against a given amino acid sequence B) is calculated as follows: 100 times the fraction X/Y, where X is the number of amino acid residues scored as identical matches by the sequence alignment program ALIGN-2 in that program's alignment of A and B, and where Y is the total number of amino acid residues in B. It will be appreciated that where the length of amino acid sequence A is not equal to the length of amino acid sequence B, the % amino acid sequence identity of A to B will not equal the % amino acid sequence identity of B to A. Unless specifically stated otherwise, all % amino acid sequence identity values used herein are obtained as described in the immediately preceding paragraph using the ALIGN-2 computer program.

[0133] In some embodiments, the term “about” means within 10% of the stated amount. For instance, an antibody variable region comprising about 80% identity to a reference variable region may comprise 72% to 88% identity to the reference variable region.

[0134] TL1A Therapeutics

[0135] Aspects provided herein are methods of treating an inflammatory, fibrostenotic, or fibrotic disease or condition in a subject by administering a therapeutically effective amount of an inhibitor of TNF Superfamily Member 15 (TL1A) activity or expression to the subject, provided a genotype is detected in a sample obtained from the subject. In some embodiments, the inhibitor of TL1A activity or expression is effective to inhibit TL1A-DR3 binding. In some embodiments, the inhibitor of TL1A activity or expression comprises an allosteric modulator of TL1A. An allosteric modulator of TL1A may indirectly influence the effects TL1A on DR3, or TR6/DcR3 on TL1A or DR3. The inhibitor of TL1A activity or expression may be a direct inhibitor or indirect inhibitor. Non-limiting examples of an inhibitor of TL1A expression include RNA to protein TL1A translation inhibitors, antisense oligonucleotides targeting the TNFSF15 mRNA (such as miRNAs, or siRNA), epigenetic editing (such as targeting the DNA-binding domain of TNFSF15, or post-translational modifications of histone tails and/or DNA molecules). Non-limiting examples of an inhibitor of TL1A activity include antagonists to the TL1A receptors, (DR3 and TR6/DcR3), antagonists to TL1A antigen, and antagonists to gene expression products involved in TL1A mediated disease. Antagonists as disclosed herein, may include, but are not limited to, an anti-TL1A antibody, an anti-TL1A-binding antibody fragment, or a small molecule. The small molecule may be a small molecule that binds to TL1A or DR3. The anti-TL1A antibody may be monoclonal or polyclonal. The anti-TL1A antibody may be humanized or chimeric. The anti-TL1A antibody may be a fusion protein. The anti-TL1A antibody may be a blocking anti-TL1A antibody. A blocking antibody blocks binding between two proteins, e.g., a ligand and its receptor. Therefore, a TL1A blocking antibody includes an antibody that prevents binding of TL1A to DR3 and/or TR6/DcR3 receptors. In a non-limiting example, the TL1A blocking antibody binds to DR3. In another example, the TL1A blocking antibody binds to DcR3. In some cases, the TL1A antibody is an anti-TL1A antibody that specifically binds to TL1A.

[0136] In certain aspects, antibodies are described herein that specifically bind to TL1A (Entrez Gene: 9966; UniProtKB: 095150). In some embodiments, the antibodies specifically bind to soluble TL1A. In some embodiments, the antibodies specifically bind to membrane bound TL1A. In some embodiments, an anti-TL1A antibody is provided having a heavy chain comprising four heavy chain framework regions (HCFR) and three heavy chain complementarity-determining regions (HCDR): HCFR1, HCDR1, HCFR2, HCDR2, HCFR3, HCDR3, and HCFR4; and a light chain comprising four light chain framework regions (LCFR) and three light chain complementarity-determining regions (LCDR): LCFR1, LCDR1, LCFR2, LCDR2, LCFR3, LCDR3, and LCFR4. An anti-TL1A antibody may comprise any region provided herein, for example, as provided in Tables 2A-2H, the examples, and the sequences.

[0137] In certain embodiments, an anti-TL1A antibody comprises a HCDR1 as set forth by any one of SEQ ID NOS: 1 or 601-722. In certain embodiments, an anti-TL1A antibody comprises a HCDR2 as set forth by any one of SEQ ID NOS: 2-5 or 723-787. In certain embodiments, an anti-TL1A antibody comprises a HCDR3 as set forth by any one of SEQ ID NOS: 6-9 or 788-842. In certain embodiments, an anti-TL1A antibody comprises a LCDR1 as set forth by any one of SEQ ID NOS: 10 or 843-865. In certain embodiments, an anti-TL1A antibody comprises a LCDR2 as set forth by any one of SEQ ID NOS: 11 or 866-885. In certain embodiments, an anti-TL1A antibody comprises a LCDR3 as set forth by any one of SEQ ID NOS: 12-15 or 886-1101.

[0138] In one aspect, provided herein are anti-TL1A antibodies having a HCDR1 comprising any one of SEQ ID NOS: 1 or 601-708, a HCDR2 comprising any one of SEQ ID NOS: 2-5 or 723-774, a HCDR3 comprising any one of SEQ ID NOS: 6-9 or 788-828, a LCDR1 comprising any one of SEQ ID NOS: 10 or 843-852, a LCDR2 comprising any one of SEQ ID NOS: 11 or 866-873, and a LCDR3 comprising any one of SEQ ID NOS: 12-15 or 886-1089.

[0139] In one aspect, provided herein are anti-TL1A antibodies having a HCDR1 comprising SEQ ID NO: 709, a HCDR2 comprising SEQ ID NO: 775, a HCDR3 comprising SEQ ID NO: 829, a LCDR1 comprising SEQ ID NO: 853, a LCDR2 comprising SEQ ID NO: 874, and a LCDR3 comprising SEQ ID NO: 1090.

[0140] In one aspect, provided herein are anti-TL1A antibodies having a HCDR1 comprising SEQ ID NO: 710, a HCDR2 comprising SEQ ID NO: 776, a HCDR3 comprising SEQ ID NO: 830, a LCDR1 comprising SEQ ID NO: 854, a LCDR2 comprising SEQ ID NO: 875, and a LCDR3 comprising SEQ ID NO: 1091. In one aspect, provided herein are anti-TL1A antibodies having a HCDR1 comprising SEQ ID NO: 711 or 712, a HCDR2 comprising SEQ ID NO: 777 or 778, a HCDR3 comprising SEQ ID NO: 831 or 832, a LCDR1 comprising SEQ ID NO: 855, a LCDR2 comprising SEQ ID NO: 876, and a LCDR3 comprising SEQ ID NO: 1092.

[0141] In one aspect, provided herein are anti-TL1A antibodies having a HCDR1 comprising SEQ ID NO: 713, a HCDR2 comprising SEQ ID NO: 779, a HCDR3 comprising SEQ ID NO: 833, a LCDR1 comprising SEQ ID NO: 856, a LCDR2 comprising SEQ ID NO: 877, and a LCDR3 comprising SEQ ID NO: 1093.

[0142] In one aspect, provided herein are anti-TL1A antibodies having a HCDR1 comprising SEQ ID NO: 714, a HCDR2 comprising SEQ ID NO: 780, a HCDR3 comprising SEQ ID NO: 834, a LCDR1 comprising SEQ ID NO: 857, a LCDR2 comprising SEQ ID NO: 878, and a LCDR3 comprising SEQ ID NO: 1094.

[0143] In one aspect, provided herein are anti-TL1A antibodies having a HCDR1 comprising SEQ ID NO: 715 or 716, a HCDR2 comprising SEQ ID NO: 781, a HCDR3 comprising SEQ ID NO: 835 or 836, a LCDR1 comprising SEQ ID NO: 858 or 859, a LCDR2 comprising SEQ ID NO: 879, and a LCDR3 comprising SEQ ID NO: 1095.

[0144] In one aspect, provided herein are anti-TL1A antibodies having a HCDR1 comprising SEQ ID NO: 717, a HCDR2 comprising SEQ ID NO: 782, a HCDR3 comprising SEQ ID NO: 837, a LCDR1 comprising SEQ ID NO: 860, a LCDR2 comprising SEQ ID NO: 880, and a LCDR3 comprising SEQ ID NO: 1096.

[0145] In one aspect, provided herein are anti-TL1A antibodies having a HCDR1 comprising SEQ ID NO: 718, a HCDR2 comprising SEQ ID NO: 783, a HCDR3 comprising SEQ ID NO: 838, a LCDR1 comprising SEQ ID NO: 861, a LCDR2 comprising SEQ ID NO: 881, and a LCDR3 comprising SEQ ID NO: 1097.

[0146] In one aspect, provided herein are anti-TL1A antibodies having a HCDR1 comprising SEQ ID NO: 719, a HCDR2 comprising SEQ ID NO: 784, a HCDR3 comprising SEQ ID NO: 839, a LCDR1 comprising SEQ ID NO: 862, a LCDR2 comprising SEQ ID NO: 882, and a LCDR3 comprising SEQ ID NO: 1098.

[0147] In one aspect, provided herein are anti-TL1A antibodies having a HCDR1 comprising SEQ ID NO: 720, a HCDR2 comprising SEQ ID NO: 785, a HCDR3 comprising SEQ ID NO: 840, a LCDR1 comprising SEQ ID NO: 863, a LCDR2 comprising SEQ ID NO: 883, and a LCDR3 comprising SEQ ID NO: 1099.

[0148] In one aspect, provided herein are anti-TL1A antibodies having a HCDR1 comprising SEQ ID NO: 721, a HCDR2 comprising SEQ ID NO: 786, a HCDR3 comprising SEQ ID NO: 841, a LCDR1 comprising SEQ ID NO: 864, a LCDR2 comprising SEQ ID NO: 884, and a LCDR3 comprising SEQ ID NO: 1100.

[0149] In one aspect, provided herein are anti-TL1A antibodies having a HCDR1 comprising SEQ ID NO: 722, a HCDR2 comprising SEQ ID NO: 787, a HCDR3 comprising SEQ ID NO: 842, a LCDR1 comprising SEQ ID NO: 865, a LCDR2 comprising SEQ ID NO: 885, and a LCDR3 comprising SEQ ID NO: 1101.

[0150] In certain embodiments, an anti-TL1A antibody comprises a HCDR1, HCDR2, HCDR3, LCDR1, LCDR2, LCDR3 selected from Table 2A. In certain embodiments, an anti-TL1A antibody comprises the CDRs set forth in any one of the antibodies of Table 2B. In certain embodiments, an anti-TL1A antibody comprises the CDRs set forth in any one of the antibodies in Table 2C. In certain embodiments, an anti-TL1A antibody comprises the CDRs set forth in any one of the heavy chain variable regions in Table 2D. In certain embodiments, an anti-TL1A antibody comprises the CDRs set forth in any one of the light chain variable regions in Table 2E. The CDRs may be defined by the Kabat, Chothia, or IMGT method. In certain embodiments, an anti-TL1A antibody comprises the CDRs set forth in antibody M1 as shown in Table 2A. In certain embodiments, an anti-TL1A antibody comprises the CDRs set forth in antibody M2 as shown in Table 2A. In certain embodiments, an anti-TL1A antibody comprises the CDRs set forth in antibody M3 as shown in Table 2A. In certain embodiments, an anti-TL1A antibody comprises the CDRs set forth in antibody M4 as shown in Table 2A. In certain embodiments, an anti-TL1A antibody comprises the CDRs set forth in antibody M5 as shown in Table 2A. In certain embodiments, an anti-TL1A antibody comprises the CDRs set forth in antibody M6 as shown in Table 2A. In certain embodiments, an anti-TL1A antibody comprises the CDRs set forth in antibody M7 as shown in Table 2A. In certain embodiments, an anti-TL1A antibody comprises the CDRs set forth in antibody M8 as shown in Table 2A. In certain embodiments, an anti-TL1A antibody comprises the CDRs set forth in antibody M9 as shown in Table 2A. In certain embodiments, an anti-TL1A antibody comprises the CDRs set forth in antibody M10 as shown in Table 2A. In certain embodiments, an anti-TL1A antibody comprises the CDRs set forth in antibody M11 as shown in Table 2A. In certain embodiments, an anti-TL1A antibody comprises the CDRs set forth in antibody M12 as shown in Table 2A.

[0151] In certain embodiments, an anti-TL1A antibody comprises a P HCDR1 (any one of SEQ ID NOS: 1 or 601-708), a P HCDR2 (any one of SEQ ID NOS: 2-5 or 723-774), a P HCDR3 (any one of SEQ ID NOS: 6-9 or 788-828), a P LCDR1 (any one of SEQ ID NOS: 10 or 843-852), a P LCDR2 (any one of SEQ ID NOS: 11 or 866-873), and a P LCDR3 (any one of SEQ ID NOS: 12-15 or 886-1089) as shown in Table 2A.

[0152] In certain embodiments, an anti-TL1A antibody comprises the CDRs set forth in antibody A as shown in Table 2B. In certain embodiments, an anti-TL1A antibody comprises the CDRs set forth in antibody A2 as shown in Table 2B. In certain embodiments, an anti-TL1A antibody comprises the CDRs set forth in antibody B as shown in Table 2B. In certain embodiments, an anti-TL1A antibody comprises the CDRs set forth in antibody B2 as shown in Table 2B. In certain embodiments, an anti-TL1A antibody comprises the CDRs set forth in antibody C as shown in Table 2B. In certain embodiments, an anti-TL1A antibody comprises the CDRs set forth in antibody C2 as shown in Table 2B. In certain embodiments, an anti-TL1A antibody comprises the CDRs set forth in antibody D as shown in Table 2B. In certain embodiments, an anti-TL1A antibody comprises the CDRs set forth in antibody D2 as shown in Table 2B. In certain embodiments, an anti-TL1A antibody comprises the CDRs set forth in antibody E as shown in Table 2B. In certain embodiments, an anti-TL1A antibody comprises the CDRs set forth in antibody E2 as shown in Table 2B. In certain embodiments, an anti-TL1A antibody comprises the CDRs set forth in antibody F as shown in Table 2B. In certain embodiments, an anti-TL1A antibody comprises the CDRs set forth in antibody F2 as shown in Table 2B. In certain embodiments, an anti-TL1A antibody comprises the CDRs set forth in antibody G as shown in Table 2B. In certain embodiments, an anti-TL1A antibody comprises the CDRs set forth in antibody G2 as shown in Table 2B. In certain embodiments, an anti-TL1A antibody comprises the CDRs set forth in antibody H as shown in Table 2B. In certain embodiments, an anti-TL1A antibody comprises the CDRs set forth in antibody H2 as shown in Table 2B. In certain embodiments, an anti-TL1A antibody comprises the CDRs set forth in antibody I as shown in Table 2B. In certain embodiments, an anti-TL1A antibody comprises the CDRs set forth in antibody 12 as shown in Table 2B.

[0153] In one aspect, provided herein is an anti-TL1A antibody comprising a heavy chain variable region comprising an amino acid sequence at least about 85%, 90%, 91%, 92%, 93%, 94%, 95%, 96%, 97%, 98%, 99%, or 100% identical to any one of SEQ ID NOS: 101-135; and a light chain variable region at least about 85%, 90%, 91%, 92%, 93%, 94%, 95%, 96%, 97%, 98%, 99%, or 100% identical to any one of SEQ ID NOS: 201-206.

[0154] In one aspect, provided herein is an anti-TL1A antibody comprising a heavy chain variable region comprising an amino acid sequence at least about 85%, 90%, 91%, 92%, 93%, 94%, 95%, 96%, 97%, 98%, 99%, or 100% identical to any one of SEQ ID NOS: 1200-1263; and a light chain variable region at least about 85%, 90%, 91%, 92%, 93%, 94%, 95%, 96%, 97%, 98%, 99%, or 100% identical to any one of SEQ ID NOS: 1264-1300, 1304-1316.

[0155] Further provided herein is an antibody or antigen binding fragment thereof that binds to tumor necrosis factor-like protein 1A (TL1A), comprising a heavy chain variable domain comprising an amino acid sequence at least about 96% identical to SEQ ID NO: 104, and a light chain variable domain comprising an amino acid sequence at least about 97% identical to SEQ ID NO: 201. In some embodiments, the heavy chain variable domain comprises an amino acid sequence at least about 97% identical to SEQ ID NO: 104. In some embodiments, the heavy chain variable domain comprises an amino acid sequence at least about 98% identical to SEQ ID NO: 104. In some embodiments, the heavy chain variable domain comprises an amino acid sequence at least about 99% identical to SEQ ID NO: 104. In some embodiments, the heavy chain variable domain comprises SEQ ID NO: 104. In some embodiments, the light chain variable domain comprises an amino acid sequence at least about 98% identical to SEQ ID NO: 201. In some embodiments, the light chain variable domain comprises an amino acid sequence at least about 99% identical to SEQ ID NO: 201. In some embodiments, the light chain variable domain comprises SEQ ID NO: 201.

[0156] Tables 2D-2G provide exemplary framework and variable region sequences. In some embodiments, an anti-TL1A antibody comprises a HC FR1 of Table 2F (SEQ ID NO: 304), a HC FR2 of Table 2F (any one of SEQ ID NOS: 305, 313, 1317), a HC FR3 of Table 2F (any one of SEQ ID NOS: 306, 307, 314, 315, 1318-1323), a HC FR4 of Table 2F (SEQ ID NO: 308), a LC FR1 of Table 2F (SEQ ID NO: 309), a LC FR2 of Table 2F (SEQ ID NO: 310 or 1324), a LC FR3 of Table 2F (SEQ ID NO: 311), and a LC FR4 of Table 2F (SEQ ID NO: 312).

[0157] In certain embodiments, an anti-TL1A antibody comprises the framework regions set forth in any one of the antibodies in Table 2C, wherein the framework regions are defined by the Kabat, Chothia, or IMGT method. In certain embodiments, an anti-TL1A antibody comprises the heavy chain framework regions set forth in any one of the antibodies in Table 2D, and the light chain framework regions set forth in any one of the antibodies in Table 2E, wherein the framework regions are defined by the Kabat, Chothia, or IMGT method.

[0158] In some embodiments, an anti-TL1A antibody comprises a heavy chain framework comprising SEQ ID NO: 301 (X1VQLVQ SGAEVKKPGASVKVSCKAS[HCDR1]WVX2QX3PGQGLEWX4G[HCDR2]RX 5TX6TX7DTSTSTX8YX9ELSSLRSEDTAVYYCAR[HCDR3]WGQGTTVTVSS). In some cases, X1 is Q. In some cases, X1=E. In some cases, X2=R. In some cases, X2=K. In some cases, X3=A. In some cases, X3=R. In some cases, X4=M. In some cases, X4=I. In some cases, X5=V. In some cases, X5=A. In some cases, X6=M. In some cases, X6=I. In some cases, X7=R. In some cases, X7=T. In some cases, X8=V. In some cases, X8=A. In some cases, X9=M. In some cases, X9=L. In some embodiments, X1 is at position 1 of IGHV1-46*02 as determined by Kabat numbering. In some embodiments, X2 is at position 45 of IGHV1-46*02 as determined by Kabat numbering. In some embodiments, X3 is at position 47 of IGHV1-46*02 as determined by Kabat numbering. In some embodiments, X4 is at position 55 of IGHV1-46*02 as determined by Kabat numbering. In some embodiments, X5 is at position 78 of IGHV1-46*02 as determined by Kabat numbering. In some embodiments, X6 is at position 80 of IGHV1-46*02 as determined by Kabat numbering. In some embodiments, X7 is at position 82 of IGHV1-46*02 as determined by Kabat numbering. In some embodiments, X8 is at position 89 of IGHV1-46*02 as determined by Kabat numbering. In some embodiments, X9 is at position 91 of IGHV1-46*02 as determined by Kabat numbering.

[0159] In one aspect, provided herein is a first embodiment of an anti-TL1A antibody comprising a heavy chain framework comprising IGHV1-46*02, or a variant thereof, wherein the variant comprises between about 1 and about 9 amino acid substitutions, or between about 1 and about 20 amino acid substitutions, or about 1, 2, 3, 4, 5, 6, 7, 8, 9, 10, 11, 12, 13, 14, 15, 16, 17, 18, 19, or 20 amino acid substitutions from IGHV1-46*02 framework. Additional embodiments include: (2) The anti-TL1A of embodiment (1), wherein the heavy chain framework comprises SEQ ID NO: 301. (3) The anti-TL1A of embodiment 2, wherein X1=Q. (4) The anti-TL1A of embodiment 2, wherein X1=E. (5) The anti-TL1A of any one of embodiments 2-4, wherein X2=R. (6) The anti-TL1A of any one of embodiments 2-4, wherein X2=K. (7) The anti-TL1A of any one of embodiments 2-6, wherein X3=A. (8) The anti-TL1A of any one of embodiments 2-6, wherein X3=R. (9) The anti-TL1A of any one of embodiments 2-8, wherein X4=M. (10) The anti-TL1A of any one of embodiments 2-8, wherein X4=I. (11) The anti-TL1A of any one of embodiments 2-10, wherein X5=V. (12) The anti-TL1A of any one of embodiments 2-10, wherein X5=A. (13) The anti-TL1A of any one of embodiments 2-12, wherein X6=M. (14) The anti-TL1A of any one of embodiments 2-12, wherein X6=I. (15) The anti-TL1A of any one of embodiments 2-14, wherein X7=R. (16) The anti-TL1A of any one of embodiments 2-14, wherein X7=T. (17) The anti-TL1A of any one of embodiments 2-16, wherein X8=V. (18) The anti-TL1A of any one of embodiments 2-16, wherein X8=A. (19) The anti-TL1A of any one of embodiments 2-18, wherein X9=M. (20) The anti-TL1A of any one of embodiments 2-4, wherein X9=L. (21) The anti-TL1A of any one of embodiments 1-20, comprising antibody A. (22) The anti-TL1A of any one of embodiments 1-20, comprising antibody B. (23) The anti-TL1A of any one of embodiments 1-20, comprising antibody C. (24) The anti-TL1A of any one of embodiments 1-20, comprising antibody D. (25) The anti-TL1A of any one of embodiments 1-20, comprising antibody E. (26) The anti-TL1A of any one of embodiments 1-20, comprising antibody F. (27) The anti-TL1A of any one of embodiments 1-20, comprising antibody G or I. (28) The anti-TL1A of any one of embodiments 1-20, comprising antibody H. (29) The anti-TL1A of any one of embodiments 1-28, comprising a human IgG1 Fc region comprising: (a) 297A, 297Q, 297G, or 297D, (b) 279F, 279K, or 279L, (c) 228P, (d) 235A, 235E, 235G, 235Q, 235R, or 235S, (e) 237A, 237E, 237K, 237N, or 237R, (f) 234A, 234V, or 234F, (g) 233P, (h) 328A, (i) 327Q or 327T, (j) 329A, 329G, 329Y, or 329R (k) 331S, (l) 236F or 236R, (m) 238A, 238E, 238G, 238H, 238I, 238V, 238 W, or 238Y, (n) 248A, (o) 254D, 254E, 254G, 254H, 254I, 254N, 254P, 254Q, 254T, or 254V, (p) 255N, (q) 256H, 256K, 256R, or 256V, (r) 264S, (s) 265H, 265K, 265S, 265Y, or 265A, (t) 267G, 267H, 267I, or 267K, (u) 268K, (v) 269N or 269Q, (w) 270A, 270G, 270M, or 270N, (x) 271T, (y) 272N, (z) 292E, 292F, 292G, or 2921, (aa) 293S, (bb) 301 W, (cc) 304E, (dd) 311E, 311G, or 311S, (ee) 316F, (ff) 328V, (gg) 330R, (hh) 339E or 339L, (ii) 3431 or 343V, (jj) 373A, 373G, or 373S, (kk) 376E, 376 W, or 376Y, (ll) 380D, (mm) 382D or 382P, (nn) 385P, (oo) 424H, 424M, or 424V, (pp) 4341, (qq) 438G, (rr) 439E, 439H, or 439Q, (ss) 440A, 440D, 440E, 440F, 440M, 440T, or 440V, (tt) E233P, (uu) L235E, (vv) L234A and L235A, (ww) L234A, L235A, and G237A, (xx) L234A, L235A, and P329G, (yy) L234F, L235E, and P331S, (zz) L234A, L235E, and G237A, (aaa), L234A, L235E, G237A, and P331S (bbb) L234A, L235A, G237A, P238S, H268A, A330S, and P331S (IgG1σ), (ccc) L234A, L235A, and P329A, (ddd) G236R and L328R, (eee) G237A, (fff) F241A, (ggg) V264A, (hhh) D265A, (iii) D265A and N297A, (jjj) D265A and N297G, (kkk) D270A, (lll) A330L, (mmm) P331A or P331S, or (nnn) any combination of (a)-(uu), per Kabat numbering. As used herein, any combination of a group, such as (a) to (uu), includes at least about two or more items from the group, e.g., any combination of a group of (a) to (uu) includes 2, 3, 4, 5, 6, 7, 8, 9, 10, 11, 12, 13, 14, 15, 16, 17, 18, 19, 20, 21, 22, 23, 24, 25, 26, 27, 28, 29, 30, 31, 32, 33, 34, 35, 36, 37, 38, 39, 40, 41, 42, 43, 44, 45, 46, and up to 47 or all of the members of the group. (30) The anti-TL1A of any one of embodiments 1-28, comprising a (i) human IgG4 Fc region or (ii) a human IgG4 Fc region comprising (a) S228P, (b) S228P and L235E, or (c) S228P, F234A, and L235A, per Kabat numbering. (31) The anti-TL1A of any one of embodiments 1-28, comprising a human IgG2 Fc region; IgG2-IgG4 cross-subclass Fc region; IgG2-IgG3 cross-subclass Fc region; IgG2 comprising H268Q, V309L, A330S, P331S (IgG2m4); or IgG2 comprising V234A, G237A, P238S, H268A, V309L, A330S, P331S (IgG2σ). (32) The anti-TL1A of any one of embodiments 1-31, comprising a heavy chain Fc region comprising any one of SEQ ID NOS: 320-362. (33) The anti-TL1A of any one of embodiments 1-32, comprising a light chain constant region comprising SEQ ID NO: 319. (34) The anti-TL1A of any one of embodiments 1-33, comprising a light chain comprising a light chain framework comprising IGKV3-20*01, or a variant thereof, wherein the variant comprises between about 1 and about 2 substitutions, or between about 1 and about 20 amino acid substitutions, or about 1, 2, 3, 4, 5, 6, 7, 8, 9, 10, 11, 12, 13, 14, 15, 16, 17, 18, 19, or 20 amino acid substitutions in the framework. (35) The anti-TL1A antibody of embodiment 34, wherein X10 is L. (36) The anti-TL1A antibody of embodiment 34, wherein X10 is P. (37) The anti-TL1A antibody of any one of embodiments 34-36, wherein X11 is L. (38) The anti-TL1A antibody of any one of embodiments 34-36, wherein X11 is W.

[0160] In some embodiments, an anti-TL1A antibody comprises a heavy chain framework comprising SEQ ID NO: 302 (X1VQLVQ SGAEVKKPGASVKVSCKAS[HCDR1]WVX2QX3PGQGLEWX4G[HCDR2]RX 5TX6TX7DTSTSTX8YX9ELSSLRSEDTAVYYC[HCDR3]WGQGTTVTVSS). In some cases, X1 is Q. In some cases, X1=E. In some cases, X2=R. In some cases, X2=K. In some cases, X3=A. In some cases, X3=R. In some cases, X4=M. In some cases, X4=I. In some cases, X5=V. In some cases, X5=A. In some cases, X6=M. In some cases, X6=I. In some cases, X7=R. In some cases, X7=T. In some cases, X8=V. In some cases, X8=A. In some cases, X9=M. In some cases, X9=L. In some embodiments, X1 is at position 1 of IGHV1-46*02 as determined by Kabat numbering. In some embodiments, X2 is at position 45 of IGHV1-46*02 as determined by Kabat numbering. In some embodiments, X3 is at position 47 of IGHV1-46*02 as determined by Kabat numbering. In some embodiments, X4 is at position 55 of IGHV1-46*02 as determined by Kabat numbering. In some embodiments, X5 is at position 78 of IGHV1-46*02 as determined by Kabat numbering. In some embodiments, X6 is at position 80 of IGHV1-46*02 as determined by Kabat numbering. In some embodiments, X7 is at position 82 of IGHV1-46*02 as determined by Kabat numbering. In some embodiments, X8 is at position 89 of IGHV1-46*02 as determined by Kabat numbering. In some embodiments, X9 is at position 91 of IGHV1-46*02 as determined by Kabat numbering.

[0161] In one aspect, provided herein is another first embodiment of an anti-TL1A antibody comprising a heavy chain framework comprising IGHV1-46*02, or a variant thereof, wherein the variant comprises between about 1 and about 9 amino acid substitutions, or between about 1 and about 20 amino acid substitutions, or about 1, 2, 3, 4, 5, 6, 7, 8, 9, 10, 11, 12, 13, 14, 15, 16, 17, 18, 19, or 20 amino acid substitutions from IGHV1-46*02 framework. Additional embodiments include: (2) The anti-TL1A of embodiment (1), wherein the heavy chain framework comprises SEQ ID NO: 302. (3) The anti-TL1A of embodiment 2, wherein X1=Q. (4) The anti-TL1A of embodiment 2, wherein X1=E. (5) The anti-TL1A of any one of embodiments 2-4, wherein X2=R. (6) The anti-TL1A of any one of embodiments 2-4, wherein X2=K. (7) The anti-TL1A of any one of embodiments 2-6, wherein X3=A. (8) The anti-TL1A of any one of embodiments 2-6, wherein X3=R. (9) The anti-TL1A of any one of embodiments 2-8, wherein X4=M. (10) The anti-TL1A of any one of embodiments 2-8, wherein X4=I. (11) The anti-TL1A of any one of embodiments 2-10, wherein X5=V. (12) The anti-TL1A of any one of embodiments 2-10, wherein X5=A. (13) The anti-TL1A of any one of embodiments 2-12, wherein X6=M. (14) The anti-TL1A of any one of embodiments 2-12, wherein X6=I. (15) The anti-TL1A of any one of embodiments 2-14, wherein X7=R. (16) The anti-TL1A of any one of embodiments 2-14, wherein X7=T. (17) The anti-TL1A of any one of embodiments 2-16, wherein X8=V. (18) The anti-TL1A of any one of embodiments 2-16, wherein X8=A. (19) The anti-TL1A of any one of embodiments 2-18, wherein X9=M. (20) The anti-TL1A of any one of embodiments 2-4, wherein X9=L. (21) The anti-TL1A of any one of embodiments 1-20, comprising antibody A. (22) The anti-TL1A of any one of embodiments 1-20, comprising antibody B. (23) The anti-TL1A of any one of embodiments 1-20, comprising antibody C. (24) The anti-TL1A of any one of embodiments 1-20, comprising antibody D. (25) The anti-TL1A of any one of embodiments 1-20, comprising antibody E. (26) The anti-TL1A of any one of embodiments 1-20, comprising antibody F. (27) The anti-TL1A of any one of embodiments 1-20, comprising antibody G or I. (28) The anti-TL1A of any one of embodiments 1-20, comprising antibody H. (29) The anti-TL1A of any one of embodiments 1-28, comprising a human IgG1 Fc region comprising: (a) 297A, 297Q, 297G, or 297D, (b) 279F, 279K, or 279L, (c) 228P, (d) 235A, 235E, 235G, 235Q, 235R, or 235S, (e) 237A, 237E, 237K, 237N, or 237R, (f) 234A, 234V, or 234F, (g) 233P, (h) 328A, (i) 327Q or 327T, (j) 329A, 329G, 329Y, or 329R (k) 331S, (l) 236F or 236R, (m) 238A, 238E, 238G, 238H, 238I, 238V, 238 W, or 238Y, (n) 248A, (o) 254D, 254E, 254G, 254H, 254I, 254N, 254P, 254Q, 254T, or 254V, (p) 255N, (q) 256H, 256K, 256R, or 256V, (r) 264S, (s) 265H, 265K, 265S, 265Y, or 265A, (t) 267G, 267H, 267I, or 267K, (u) 268K, (v) 269N or 269Q, (w) 270A, 270G, 270M, or 270N, (x) 271T, (y) 272N, (z) 292E, 292F, 292G, or 2921, (aa) 293S, (bb) 301 W, (cc) 304E, (dd) 311E, 311G, or 311S, (ee) 316F, (ff) 328V, (gg) 330R, (hh) 339E or 339L, (ii) 3431 or 343V, (jj) 373A, 373G, or 373S, (kk) 376E, 376 W, or 376Y, (ll) 380D, (mm) 382D or 382P, (nn) 385P, (oo) 424H, 424M, or 424V, (pp) 4341, (qq) 438G, (rr) 439E, 439H, or 439Q, (ss) 440A, 440D, 440E, 440F, 440M, 440T, or 440V, (tt) E233P, (uu) L235E, (vv) L234A and L235A, (ww) L234A, L235A, and G237A, (xx) L234A, L235A, and P329G, (yy) L234F, L235E, and P331S, (zz) L234A, L235E, and G237A, (aaa), L234A, L235E, G237A, and P331S (bbb) L234A, L235A, G237A, P238S, H268A, A330S, and P331S (IgG1σ), (ccc) L234A, L235A, and P329A, (ddd) G236R and L328R, (eee) G237A, (fff) F241A, (ggg) V264A, (hhh) D265A, (iii) D265A and N297A, (jjj) D265A and N297G, (kkk) D270A, (lll) A330L, (mmm) P331A or P331S, or (nnn) any combination of (a)-(uu), per Kabat numbering. (30) The anti-TL1A of any one of embodiments 1-28, comprising a (i) human IgG4 Fc region or (ii) a human IgG4 Fc region comprising (a) S228P and L235E, or (b) S228P, F234A, and L235A, per Kabat numbering. (31) The anti-TL1A of any one of embodiments 1-28, comprising a human IgG2 Fc region; IgG2-IgG4 cross-subclass Fc region; IgG2-IgG3 cross-subclass Fc region; IgG2 comprising H268Q, V309L, A330S, P331S (IgG2m4); or IgG2 comprising V234A, G237A, P238S, H268A, V309L, A330S, P331S (IgG2σ). (32) The anti-TL1A of any one of embodiments 1-31, comprising a heavy chain Fc region comprising any one of SEQ ID NOS: 320-362. (33) The anti-TL1A of any one of embodiments 1-32, comprising a light chain constant region comprising SEQ ID NO: 319. (34) The anti-TL1A of any one of embodiments 1-33, comprising a light chain comprising a light chain framework comprising IGKV3-20*01, or a variant thereof, wherein the variant comprises between about 1 and about 2 substitutions, or between about 1 and about 20 amino acid substitutions, or about 1, 2, 3, 4, 5, 6, 7, 8, 9, 10, 11, 12, 13, 14, 15, 16, 17, 18, 19, or 20 amino acid substitutions in the framework. (35) The anti-TL1A antibody of embodiment 34, wherein X10 is L. (36) The anti-TL1A antibody of embodiment 34, wherein X10 is P. (37) The anti-TL1A antibody of any one of embodiments 34-36, wherein X1I is L. (38) The anti-TL1A antibody of any one of embodiments 34-36, wherein X1I is W.

[0162] In some embodiments, an anti-TL1A antibody comprises a light chain framework comprising SEQ ID NO: 303 (EIVLTQSPGTLSLSPGERATLSC[LCDR1]WYQQKPGQAPRX10X11IY[LCDR2]GIPDRFS GSGSGTDFTLTISRLEPEDFAVYYC[LCDR3]FGGGTKLEIK). In some cases, X10 is L. In some cases, X10 is P. In some cases, X1I is L. In some cases, X1I is W. In some embodiments, X10 is at position 54 of IGKV3-20*01 as determined by Kabat numbering. In some embodiments, X1I is at position 55 of IGKV3-20*01 as determined by Kabat numbering.

[0163] In some embodiments, an anti-TL1A antibody comprises a heavy chain framework comprising IGHV1-46*02. In some embodiments, an anti-TL1A antibody comprises a heavy chain framework comprising a variant of IGHV1-46*02 comprising between about 1 and about 20 amino acid substitutions from SEQ ID NO: 316. In some embodiments, an anti-TL1A antibody comprises a heavy chain framework comprising a variant of IGHV1-46*02 comprising between about 1 and about 9 amino acid substitutions from SEQ ID NO: 316. In some embodiments, an anti-TL1A antibody comprises a heavy chain framework comprising a variant of IGHV1-46*02 comprising about 1, 2, 3, 4, 5, 6, 7, 8, 9, 10, 11, 12, 13, 14, 15, 16, 17, 18, 19, or 20 amino acid substitutions from SEQ ID NO: 316 in the framework. In some cases, the heavy chain framework substitution comprises Q1E, as determined by Kabat numbering. In some cases, the heavy chain framework substitution comprises R45K, as determined by Kabat numbering. In some cases, the heavy chain framework substitution comprises A47R, as determined by Kabat numbering. In some cases, the heavy chain framework substitution comprises M55I, as determined by Kabat numbering. In some cases, the heavy chain framework substitution comprises V78A, as determined by Kabat numbering. In some cases, the heavy chain framework substitution comprises M80I, as determined by Kabat numbering. In some cases, the heavy chain framework substitution comprises R82T, as determined by Kabat numbering. In some cases, the heavy chain framework substitution comprises V89A, as determined by Kabat numbering. In some cases, the heavy chain framework substitution comprises M91L, as determined by Kabat numbering.

[0164] In some embodiments, an anti-TL1A antibody comprises a light chain framework comprising IGKV3-20*01. In some embodiments, an anti-TL1A antibody comprises a variant of IGKV3-20*01 comprising between about 1 and about 20 amino acid substitutions from SEQ ID NO: 317. In some embodiments, an anti-TL1A antibody comprises a variant of IGKV3-20*01 comprising about 1 amino acid substitution from SEQ ID NO: 317. In some embodiments, an anti-TL1A antibody comprises a light chain framework comprising a variant of IGKV3-20*01 comprising about 2 amino acid substitutions from SEQ ID NO: 317. In some embodiments, an anti-TL1A antibody comprises a light chain framework comprising a variant of IGKV3-20*01 comprising about 1, 2, 3, 4, 5, 6, 7, 8, 9, 10, 11, 12, 13, 14, 15, 16, 17, 18, 19, or 20 amino acid substitutions from SEQ ID NO: 317 in the framework. In some cases, the light chain framework substitution comprises Q1E, as determined by Kabat numbering. In some cases, the light chain framework substitution comprises R45K, as determined by Kabat numbering.

[0165] In some embodiments, an anti-TL1A antibody comprises a heavy chain FR1 as set forth by SEQ ID NO: 304. In some embodiments, an anti-TL1A antibody comprises a heavy chain FR2 as set forth by SEQ ID NO: 305. In some embodiments, an anti-TL1A antibody comprises a heavy chain FR2 as set forth by SEQ ID NO: 313. In some embodiments, an anti-TL1A antibody comprises a heavy chain FR2 as set forth by SEQ ID NO: 1317. In some embodiments, an anti-TL1A antibody comprises a heavy chain FR3 as set forth by SEQ ID NO: 306. In some embodiments, an anti-TL1A antibody comprises a heavy chain FR3 as set forth by SEQ ID NO: 307. In some embodiments, an anti-TL1A antibody comprises a heavy chain FR3 as set forth by SEQ ID NO: 314. In some embodiments, an anti-TL1A antibody comprises a heavy chain FR3 as set forth by SEQ ID NO: 315. In some embodiments, an anti-TL1A antibody comprises a heavy chain FR3 as set forth by SEQ ID NO: 1318. In some embodiments, an anti-TL1A antibody comprises a heavy chain FR3 as set forth by SEQ ID NO: 1319. In some embodiments, an anti-TL1A antibody comprises a heavy chain FR3 as set forth by SEQ ID NO: 1320. In some embodiments, an anti-TL1A antibody comprises a heavy chain FR3 as set forth by SEQ ID NO: 1321. In some embodiments, an anti-TL1A antibody comprises a heavy chain FR3 as set forth by SEQ ID NO: 1322. In some embodiments, an anti-TL1A antibody comprises a heavy chain FR3 as set forth by SEQ ID NO: 1323. In some embodiments, an anti-TL1A antibody comprises a heavy chain FR4 as set forth by SEQ ID NO: 308. In some embodiments, an anti-TL1A antibody comprises a light chain FR1 as set forth by SEQ ID NO: 309. In some embodiments, an anti-TL1A antibody comprises a light chain FR2 as set forth by SEQ ID NO: 310. In some embodiments, an anti-TL1A antibody comprises a light chain FR2 as set forth by SEQ ID NO: 1324. In some embodiments, an anti-TL1A antibody comprises a light chain FR3 as set forth by SEQ ID NO: 311. In some embodiments, an anti-TL1A antibody comprises a light chain FR3 as set forth by SEQ ID NO: 1325. In some embodiments, an anti-TL1A antibody comprises a light chain FR4 as set forth by SEQ ID NO: 312.

[0166] In some embodiments, one or more amino acid modifications may be introduced into the Fragment crystallizable (Fc) region of a human or humanized antibody, thereby generating an Fc region variant. An Fc region may comprise a C-terminal region of an immunoglobulin heavy chain that comprises a hinge region, CH2 domain, CH3 domain, or any combination thereof. As used herein, an Fc region includes native sequence Fc regions and variant Fc regions. The Fc region variant may comprise a human Fc region sequence (e.g., a human IgG1, IgG2, IgG3 or IgG4 Fc region) comprising an amino acid modification (e.g., a substitution, addition, or deletion) at one or more amino acid positions. In an exemplary embodiment, the Fc region comprises any one of SEQ ID NOS: 320-362, 401-413, 501-515.

[0167] In some embodiments, antibodies of this disclosure have a reduced effector function as compared to a human IgG. Effector function refers to a biological event resulting from the interaction of an antibody Fc region with an Fc receptor or ligand. Non-limiting effector functions include C1q binding, complement dependent cytotoxicity (CDC), Fc receptor binding, antibody-dependent cell-mediated cytotoxicity (ADCC), antibody-dependent cellular phagocytosis (ADCP), cytokine secretion, immune complex-mediated antigen uptake by antigen presenting cells, down regulation of cell surface receptors (e.g. B cell receptor), and B cell activation. In some cases, antibody-dependent cell-mediated cytotoxicity (ADCC) refers to a cell-mediated reaction in which nonspecific cytotoxic cells expressing Fc receptors (e.g., natural killer cells, neutrophils, macrophages) recognize bound antibody on a target cell, subsequently causing lysis of the target cell. In some cases, complement dependent cytotoxicity (CDC) refers to lysing of a target cells in the presence of complement, where the complement action pathway is initiated by the binding of C1q to antibody bound with the target.

[0168] Some Fc regions have a natural lack of effector function, and some Fc regions can comprise mutations that reduce effector functions. For instance, IgG4 has low ADCC and CDC activities and IgG2 has low ADCC activity.

[0169] The disclosure provides antibodies comprising Fc regions characterized by exhibiting ADCC that is reduced by at least about 30%, at least about 40%, at least about 50%, at least about 60%, at least about 70% or more as compared to an antibody comprising a non-variant Fc region, i.e., an antibody with the same sequence identity but for the substitution(s) that decrease ADCC (such as human IgG1, SEQ ID NO: 320). The disclosure provides antibodies comprising Fc regions characterized by exhibiting CDC that is reduced by at least about 30%, at least about 40%, at least about 50%, at least about 60%, at least about 70% or more as compared to an antibody comprising a non-variant Fc region, i.e., an antibody with the same sequence identity but for the substitution(s) that decrease CDC (such as human IgG1, SEQ ID NO: 320). In certain embodiments, the antibodies of this disclosure have reduced effector function as compared with human IgG1. Measurement of effector function may be performed as described in Example 3.

[0170] Non-limiting examples of Fc mutations in IgG1 that may reduce ADCC and/or CDC include substitutions at one or more of positions: 231, 232, 234, 235, 236, 237, 238, 239, 264, 265, 267, 269, 270, 297, 299, 318, 320, 322, 325, 327, 328, 329, 330, and 331 in IgG1, where the numbering system of the constant region is that of the EU index as set forth by Kabat. In certain embodiments, the antibodies of this disclosure have reduced effector function as compared with human IgG1.

[0171] In some embodiments, an antibody comprises an IgG1 Fc region comprising an N297A substitution, according to the Kabat numbering system. In some embodiments, an antibody comprises an IgG1 Fc region comprising an N297Q substitution, according to the Kabat numbering system. In some embodiments, an antibody comprises an IgG1 Fc region comprising an N297D substitution, according to the Kabat numbering system. In some embodiments, an antibody comprises an IgG1 Fc region comprising an D265A substitution, according to the Kabat numbering system. In some embodiments, an antibody comprises an IgG1 Fc region comprising an S228P substitution, according to the Kabat numbering system. In some embodiments, an antibody comprises an IgG1 Fc region comprising an L235A substitution, according to the Kabat numbering system. In some embodiments, an antibody comprises an IgG1 Fc region comprising an L237A substitution, according to the Kabat numbering system. In some embodiments, an antibody comprises an IgG1 Fc region comprising an L234A substitution, according to the Kabat numbering system. In some embodiments, an antibody comprises an IgG1 Fc region comprising an E233P substitution, according to the Kabat numbering system. In some embodiments, an antibody comprises an IgG1 Fc region comprising an L234V substitution, according to the Kabat numbering system. In some embodiments, an antibody comprises an IgG1 Fc region comprising an C236 deletion, according to the Kabat numbering system. In some embodiments, an antibody comprises an IgG1 Fc region comprising a P238A substitution, according to the Kabat numbering system. In some embodiments, an antibody comprises an IgG1 Fc region comprising an A327Q substitution, according to the Kabat numbering system. In some embodiments, an antibody comprises an IgG1 Fc region comprising a P329A substitution, according to the Kabat numbering system. In some embodiments, an antibody comprises an IgG1 Fc region comprising an P329G substitution, according to the Kabat numbering system. In some embodiments, an antibody comprises an IgG1 Fc region comprising an L235E substitution, according to the Kabat numbering system. In some embodiments, an antibody comprises an IgG1 Fc region comprising an P331S substitution, according to the Kabat numbering system. In some embodiments, an antibody comprises an IgG1 Fc region comprising an L234F substitution, according to the Kabat numbering system. In some embodiments, an antibody comprises an IgG1 Fc region comprising a 235G substitution, according to the Kabat numbering system. In some embodiments, an antibody comprises an IgG1 Fc region comprising an 235Q substitution, according to the Kabat numbering system. In some embodiments, an antibody comprises an IgG1 Fc region comprising an 235R substitution, according to the Kabat numbering system. In some embodiments, an antibody comprises an IgG1 Fc region comprising an 235S substitution, according to the Kabat numbering system. In some embodiments, an antibody comprises an IgG1 Fc region comprising an 236F substitution, according to the Kabat numbering system. In some embodiments, an antibody comprises an IgG1 Fc region comprising an 236R substitution, according to the Kabat numbering system. In some embodiments, an antibody comprises an IgG1 Fc region comprising an 237E substitution, according to the Kabat numbering system. In some embodiments, an antibody comprises an IgG1 Fc region comprising an 237K substitution, according to the Kabat numbering system. In some embodiments, an antibody comprises an IgG1 Fc region comprising an 237N substitution, according to the Kabat numbering system. In some embodiments, an antibody comprises an IgG1 Fc region comprising an 237R substitution, according to the Kabat numbering system. In some embodiments, an antibody comprises an IgG1 Fc region comprising an 238A substitution, according to the Kabat numbering system. In some embodiments, an antibody comprises an IgG1 Fc region comprising an 238E substitution, according to the Kabat numbering system. In some embodiments, an antibody comprises an IgG1 Fc region comprising an 238G substitution, according to the Kabat numbering system. In some embodiments, an antibody comprises an IgG1 Fc region comprising an 238H substitution, according to the Kabat numbering system. In some embodiments, an antibody comprises an IgG1 Fc region comprising an 238I substitution, according to the Kabat numbering system. In some embodiments, an antibody comprises an IgG1 Fc region comprising an 238V substitution, according to the Kabat numbering system. In some embodiments, an antibody comprises an IgG1 Fc region comprising an 238 W substitution, according to the Kabat numbering system. In some embodiments, an antibody comprises an IgG1 Fc region comprising an 238Y substitution, according to the Kabat numbering system. In some embodiments, an antibody comprises an IgG1 Fc region comprising an 248A substitution, according to the Kabat numbering system. In some embodiments, an antibody comprises an IgG1 Fc region comprising an 254D substitution, according to the Kabat numbering system. In some embodiments, an antibody comprises an IgG1 Fc region comprising an 254E substitution, according to the Kabat numbering system. In some embodiments, an antibody comprises an IgG1 Fc region comprising an 254G substitution, according to the Kabat numbering system. In some embodiments, an antibody comprises an IgG1 Fc region comprising an 254H substitution, according to the Kabat numbering system. In some embodiments, an antibody comprises an IgG1 Fc region comprising an 254I substitution, according to the Kabat numbering system. In some embodiments, an antibody comprises an IgG1 Fc region comprising an 254N substitution, according to the Kabat numbering system. In some embodiments, an antibody comprises an IgG1 Fc region comprising an 254P substitution, according to the Kabat numbering system. In some embodiments, an antibody comprises an IgG1 Fc region comprising an 254Q substitution, according to the Kabat numbering system. In some embodiments, an antibody comprises an IgG1 Fc region comprising an 254T substitution, according to the Kabat numbering system. In some embodiments, an antibody comprises an IgG1 Fc region comprising an 254V substitution, according to the Kabat numbering system. In some embodiments, an antibody comprises an IgG1 Fc region comprising an 255N substitution, according to the Kabat numbering system. In some embodiments, an antibody comprises an IgG1 Fc region comprising an 256H substitution, according to the Kabat numbering system. In some embodiments, an antibody comprises an IgG1 Fc region comprising an 256K substitution, according to the Kabat numbering system. In some embodiments, an antibody comprises an IgG1 Fc region comprising an 256R substitution, according to the Kabat numbering system. In some embodiments, an antibody comprises an IgG1 Fc region comprising an 256V substitution, according to the Kabat numbering system. In some embodiments, an antibody comprises an IgG1 Fc region comprising an 264S substitution, according to the Kabat numbering system. In some embodiments, an antibody comprises an IgG1 Fc region comprising an 265H substitution, according to the Kabat numbering system. In some embodiments, an antibody comprises an IgG1 Fc region comprising an 265K substitution, according to the Kabat numbering system. In some embodiments, an antibody comprises an IgG1 Fc region comprising an 265S substitution, according to the Kabat numbering system. In some embodiments, an antibody comprises an IgG1 Fc region comprising an 265Y substitution, according to the Kabat numbering system. In some embodiments, an antibody comprises an IgG1 Fc region comprising an 267G substitution, according to the Kabat numbering system. In some embodiments, an antibody comprises an IgG1 Fc region comprising an 267H substitution, according to the Kabat numbering system. In some embodiments, an antibody comprises an IgG1 Fc region comprising an 267I substitution, according to the Kabat numbering system. In some embodiments, an antibody comprises an IgG1 Fc region comprising an 267K substitution, according to the Kabat numbering system. In some embodiments, an antibody comprises an IgG1 Fc region comprising an 268K substitution, according to the Kabat numbering system. In some embodiments, an antibody comprises an IgG1 Fc region comprising an 269N substitution, according to the Kabat numbering system. In some embodiments, an antibody comprises an IgG1 Fc region comprising an 269Q substitution, according to the Kabat numbering system. In some embodiments, an antibody comprises an IgG1 Fc region comprising an 270A substitution, according to the Kabat numbering system. In some embodiments, an antibody comprises an IgG1 Fc region comprising an 270G substitution, according to the Kabat numbering system. In some embodiments, an antibody comprises an IgG1 Fc region comprising an 270M substitution, according to the Kabat numbering system. In some embodiments, an antibody comprises an IgG1 Fc region comprising an 270N substitution, according to the Kabat numbering system. In some embodiments, an antibody comprises an IgG1 Fc region comprising an 271T substitution, according to the Kabat numbering system. In some embodiments, an antibody comprises an IgG1 Fc region comprising an 272N substitution, according to the Kabat numbering system. In some embodiments, an antibody comprises an IgG1 Fc region comprising an 279F substitution, according to the Kabat numbering system. In some embodiments, an antibody comprises an IgG1 Fc region comprising an 279K substitution, according to the Kabat numbering system. In some embodiments, an antibody comprises an IgG1 Fc region comprising an 279L substitution, according to the Kabat numbering system. In some embodiments, an antibody comprises an IgG1 Fc region comprising an 292E substitution, according to the Kabat numbering system. In some embodiments, an antibody comprises an IgG1 Fc region comprising an 292F substitution, according to the Kabat numbering system. In some embodiments, an antibody comprises an IgG1 Fc region comprising an 292G substitution, according to the Kabat numbering system. In some embodiments, an antibody comprises an IgG1 Fc region comprising an 2921 substitution, according to the Kabat numbering system. In some embodiments, an antibody comprises an IgG1 Fc region comprising an 293S substitution, according to the Kabat numbering system. In some embodiments, an antibody comprises an IgG1 Fc region comprising an 301 W substitution, according to the Kabat numbering system. In some embodiments, an antibody comprises an IgG1 Fc region comprising an 304E substitution, according to the Kabat numbering system. In some embodiments, an antibody comprises an IgG1 Fc region comprising an 311E substitution, according to the Kabat numbering system. In some embodiments, an antibody comprises an IgG1 Fc region comprising an 311G substitution, according to the Kabat numbering system. In some embodiments, an antibody comprises an IgG1 Fc region comprising an 311S substitution, according to the Kabat numbering system. In some embodiments, an antibody comprises an IgG1 Fc region comprising an 316F substitution, according to the Kabat numbering system. In some embodiments, an antibody comprises an IgG1 Fc region comprising an 327T substitution, according to the Kabat numbering system. In some embodiments, an antibody comprises an IgG1 Fc region comprising an 328V substitution, according to the Kabat numbering system. In some embodiments, an antibody comprises an IgG1 Fc region comprising an 329Y substitution, according to the Kabat numbering system. In some embodiments, an antibody comprises an IgG1 Fc region comprising an 330R substitution, according to the Kabat numbering system. In some embodiments, an antibody comprises an IgG1 Fc region comprising an 339E substitution, according to the Kabat numbering system. In some embodiments, an antibody comprises an IgG1 Fc region comprising an 339L substitution, according to the Kabat numbering system. In some embodiments, an antibody comprises an IgG1 Fc region comprising an 3431 substitution, according to the Kabat numbering system. In some embodiments, an antibody comprises an IgG1 Fc region comprising an 343V substitution, according to the Kabat numbering system. In some embodiments, an antibody comprises an IgG1 Fc region comprising an 373A substitution, according to the Kabat numbering system. In some embodiments, an antibody comprises an IgG1 Fc region comprising an 373G substitution, according to the Kabat numbering system. In some embodiments, an antibody comprises an IgG1 Fc region comprising an 373S substitution, according to the Kabat numbering system. In some embodiments, an antibody comprises an IgG1 Fc region comprising an 376E substitution, according to the Kabat numbering system. In some embodiments, an antibody comprises an IgG1 Fc region comprising an 376 W substitution, according to the Kabat numbering system. In some embodiments, an antibody comprises an IgG1 Fc region comprising an 376Y substitution, according to the Kabat numbering system. In some embodiments, an antibody comprises an IgG1 Fc region comprising an 380D substitution, according to the Kabat numbering system. In some embodiments, an antibody comprises an IgG1 Fc region comprising an 382D substitution, according to the Kabat numbering system. In some embodiments, an antibody comprises an IgG1 Fc region comprising an 382P substitution, according to the Kabat numbering system. In some embodiments, an antibody comprises an IgG1 Fc region comprising an 385P substitution, according to the Kabat numbering system. In some embodiments, an antibody comprises an IgG1 Fc region comprising an 424H substitution, according to the Kabat numbering system. In some embodiments, an antibody comprises an IgG1 Fc region comprising an 424M substitution, according to the Kabat numbering system. In some embodiments, an antibody comprises an IgG1 Fc region comprising an 424V substitution, according to the Kabat numbering system. In some embodiments, an antibody comprises an IgG1 Fc region comprising an 4341 substitution, according to the Kabat numbering system. In some embodiments, an antibody comprises an IgG1 Fc region comprising an 438G substitution, according to the Kabat numbering system. In some embodiments, an antibody comprises an IgG1 Fc region comprising an 439E substitution, according to the Kabat numbering system. In some embodiments, an antibody comprises an IgG1 Fc region comprising an 439H substitution, according to the Kabat numbering system. In some embodiments, an antibody comprises an IgG1 Fc region comprising an 439Q substitution, according to the Kabat numbering system. In some embodiments, an antibody comprises an IgG1 Fc region comprising an 440A substitution, according to the Kabat numbering system. In some embodiments, an antibody comprises an IgG1 Fc region comprising an 440D substitution, according to the Kabat numbering system. In some embodiments, an antibody comprises an IgG1 Fc region comprising an 440E substitution, according to the Kabat numbering system. In some embodiments, an antibody comprises an IgG1 Fc region comprising an 440F substitution, according to the Kabat numbering system. In some embodiments, an antibody comprises an IgG1 Fc region comprising an 440M substitution, according to the Kabat numbering system. In some embodiments, an antibody comprises an IgG1 Fc region comprising an 440T Fc region substitution, according to the Kabat numbering system. In some embodiments, an antibody comprises an IgG1 Fc region comprising an 440V substitution, according to the Kabat numbering system.

[0172] In some embodiments, an antibody comprises a Fc region selected from the representative sequences disclosed in Table 2G. In some embodiments, an antibody comprises an IgG1 Fc region comprising E233P, according to the Kabat numbering system. In some embodiments, an antibody comprises an IgG4 Fc region comprising S228P and L235E. In some embodiments, an antibody comprises an IgG1 Fc region comprising L235E, according to the Kabat numbering system. In some embodiments, an antibody comprises an IgG1 Fc region comprising L234A and L235A, according to the Kabat numbering system. In some embodiments, an antibody comprises an IgG1 Fc region comprising L234A, L235A, and G237A, according to the Kabat numbering system. In some embodiments, an antibody comprises an IgG1 Fc region comprising L234A, L235A, P329G, according to the Kabat numbering system. In some embodiments, an antibody comprises an IgG1 Fc region comprising L234F, L235E, and P331S, according to the Kabat numbering system. In some embodiments, an antibody comprises an IgG1 Fc region comprising L234A, L235E, and G237A, according to the Kabat numbering system. In some embodiments, an antibody comprises an IgG1 Fc region comprising L234A, L235E, G237A, and P331S, according to the Kabat numbering system. In some embodiments, an antibody comprises an IgG1 Fc region comprising L234A, L235A, G237A, P238S, H268A, A330S, and P331S (IgG1σ), according to the Kabat numbering system. In some embodiments, an antibody comprises an IgG1 Fc region comprising L234A, L235A, and P329A, according to the Kabat numbering system. In some embodiments, an antibody comprises an IgG1 Fc region comprising G236R and L328R, according to the Kabat numbering system. In some embodiments, an antibody comprises an IgG1 Fc region comprising G237A, according to the Kabat numbering system. In some embodiments, an antibody comprises an IgG1 Fc region comprising F241A, according to the Kabat numbering system. In some embodiments, an antibody comprises an IgG1 Fc region comprising V264A, according to the Kabat numbering system. In some embodiments, an antibody comprises an IgG1 Fc region comprising D265A, according to the Kabat numbering system. In some embodiments, an antibody comprises an IgG1 Fc region comprising D265A and N297A, according to the Kabat numbering system. In some embodiments, an antibody comprises an IgG1 Fc region comprising D265A and N297G, according to the Kabat numbering system. In some embodiments, an antibody comprises an IgG1 Fc region comprising D270A, according to the Kabat numbering system. In some embodiments, an antibody comprises an IgG1 Fc region comprising N297A, according to the Kabat numbering system. In some embodiments, an antibody comprises an IgG1 Fc region comprising N297G, according to the Kabat numbering system. In some embodiments, an antibody comprises an IgG1 Fc region comprising N297D, according to the Kabat numbering system. In some embodiments, an antibody comprises an IgG1 Fc region comprising N297Q, according to the Kabat numbering system. In some embodiments, an antibody comprises an IgG1 Fc region comprising P329A, according to the Kabat numbering system. In some embodiments, an antibody comprises an IgG1 Fc region comprising P329G, according to the Kabat numbering system. In some embodiments, an antibody comprises an IgG1 Fc region comprising P329R, according to the Kabat numbering system. In some embodiments, an antibody comprises an IgG1 Fc region comprising A330L, according to the Kabat numbering system. In some embodiments, an antibody comprises an IgG1 Fc region comprising P331A, according to the Kabat numbering system. In some embodiments, an antibody comprises an IgG1 Fc region comprising P331S, according to the Kabat numbering system. In some embodiments, an antibody comprises an IgG2 Fc region. In some embodiments, an antibody comprises an IgG4 Fc region. In some embodiments, an antibody comprises an IgG4 Fc region comprising S228P, according to the Kabat numbering system. In some embodiments, an antibody comprises an IgG4 Fc region comprising S228P, F234A, and L235A, according to the Kabat numbering system. In some embodiments, an antibody comprises an IgG2-IgG4 cross-subclass (IgG2/G4) Fc region. In some embodiments, an antibody comprises an IgG2-IgG3 cross-subclass Fc region. In some embodiments, an antibody comprises an IgG2 Fc region comprising H268Q, V309L, A330S, and P331S, according to the Kabat numbering system. In some embodiments, an antibody comprises an IgG2 Fc region comprising V234A, G237A, P238S, H268A, V309L, A330S, and P331S, according to the Kabat numbering system. In some embodiments, an antibody comprises a Fc region comprising high mannose glycosylation.

[0173] In some embodiments, an antibody comprises an IgG4 Fc region comprising a S228P substitution, according to the Kabat numbering system. In some embodiments, an antibody comprises an IgG4 Fc region comprising an A330S substitution, according to the Kabat numbering system. In some embodiments, an antibody comprises an IgG4 Fc region comprising a P331S substitution, according to the Kabat numbering system.

[0174] In some embodiments, an antibody comprises an IgG2 Fc region comprising an A330S substitution, according to the Kabat numbering system. In some embodiments, an antibody comprises an IgG2 Fc region comprising an P331S substitution, according to the Kabat numbering system. In some embodiments, an antibody comprises an IgG2 Fc region comprising an 234A substitution, according to the Kabat numbering system. In some embodiments, an antibody comprises an IgG2 Fc region comprising an 237A substitution, according to the Kabat numbering system.

[0175] In certain embodiments, an anti-TL1A antibody described herein comprises a Fc region comprising a sequence from Table 2G. In certain embodiments, an anti-TL1A described herein comprises a Fc region as shown in Table 2H.

TABLE 2H
Exemplary Fc Mutations

| | Constant Region (SEQ ID NO) | | |
|---|---|---|---|
| Mutations | K_DL | R_EM | K_EM |
| Wild-type IgG1 | 320 | 321 | 322 |
| L235E | 323 | 324 | 325 |
| L234A, L235A | 326 | 327 | 328 |
| L234A, L235A, G237A | 329 | 330 | 331 |
| L234A, L235A, P329G | 332 | 333 | 334 |
| L234F, L235E, P331S | 335 | 336 | 337 |
| L234A, L235E, G237A | 338 | 339 | 340 |
| L234A, L235E, G237A, P331S | 341 | 342 | 343 |
| L234A, L235A, P329A | 344 | 345 | 346 |
| D265A | 347 | 348 | 349 |
| N297G | 350 | 351 | 352 |
| D265A, N297A | 353 | 354 | 355 |
| D265A, N297G | 356 | 357 | 358 |
| L235A, G237A | 359 | 360 | 361 |
| Wild-type IgG4 | 362 | | |

[0176] In some embodiments, the antibodies of this disclosure are variants that possess some but not all effector functions, which make it a desirable candidate for applications in which the half-life of the antibody in vivo is important yet certain effector functions (such as complement and ADCC) are unnecessary or deleterious.

[0177] In vitro and/or in vivo cytotoxicity assays can be conducted to confirm the reduction/depletion of CDC and/or ADCC activities. For example, Fc receptor (FcR) binding assays can be conducted to ensure that the antibody lacks FcγR binding (hence likely lacking ADCC activity) but retains FcRn binding ability. Measurement of effector function may be performed as described in Example 3.

[0178] In some embodiments, antibodies are tested for binding to Fc receptors and complement C1q by ELISA. In some embodiments, antibodies are tested for the ability to activate primary human immune cells in vitro, for example, by assessing their ability to induce expression of activation markers.

[0179] In some embodiments, assessment of ADCC activity of an anti-TL1A antibody comprises adding the antibody to target cells in combination with immune effector cells, which may be activated by the antigen antibody complexes resulting in cytolysis of the target cell. Cytolysis may be detected by the release of label (e.g. radioactive substrates, fluorescent dyes or natural intracellular proteins) from the lysed cells. Useful effector cells for such assays include peripheral blood mononuclear cells (PBMC) and Natural Killer (NK) cells. Specific examples of in vitro ADCC assays are described in Wisecarver et al., 1985 79:277-282; Bruggemann et al., 1987, J Exp Med 166:1351-1361; Wilkinson et al., 2001, J Immunol Methods 258:183-191; Patel et al., 1995 J Immunol Methods 184:29-38. Alternatively, or additionally, ADCC activity of the antibody of interest may be assessed in vivo, e.g., in an animal model such as that disclosed in Clynes et al., 1998, PNAS USA 95:652-656.

[0180] In some embodiments, antibodies comprising a Fc region herein exhibit decreased ADCC activities as compared to an unmodified antibody (e.g., an antibody with human IgG1). In some embodiments, the antibodies herein exhibit ADCC activities that are at least 2-fold, or at least 3-fold, or at least 5-fold or at least 10-fold or at least 50-fold or at least 100-fold less than that of an unmodified antibody. In some embodiments, antibodies herein exhibit ADCC activities that are reduced by at least 10%, or at least 20%, or by at least 30%, or by at least 40%, or by at least 50%, or by at least 60%, or by at least 70%, or by at least 80%, or by at least 90%, or by at least 100%, or by at least 200%, or by at least 300%, or by at least 400%, or by at least 500% relative to an unmodified antibody. In certain embodiments, antibodies herein have no detectable ADCC activity. In certain embodiments, the reduction and/or abatement of ADCC activity may be attributed to the reduced affinity antibodies of the invention exhibit for Fc ligands and/or receptors.

[0181] In some embodiments, an assessment of complement activation, a CDC assay, may be performed as described in Gazzano-Santoro et al., 1996, J. Immunol. Methods, 202:163.

[0182] In some embodiments, antibodies comprising Fc regions described herein exhibit decreased affinities to C1q relative to an unmodified antibody (e.g., human IgG1). In some embodiments, antibodies herein exhibit affinities for C1q receptor that are at least 2 fold, or at least 3 fold, or at least 5 fold, or at least 7 fold, or at least 10 fold, or at least 20 fold, or at least 30 fold, or at least 40 fold, or at least 50 fold, or at least 60 fold, or at least 70 fold, or at least 80 fold, or at least 90 fold, or at least 100 fold, or at least 200 fold less than an unmodified antibody. In some embodiments, antibodies herein exhibit affinities for C1q that are at least 90%, at least 80%, at least 70%, at least 60%, at least 50%, at least 40%, at least 30%, at least 20%, at least 10%, or at least 5% less than an unmodified antibody. In some embodiments, antibodies herein exhibit affinities for C1q that are between about 100 nM to about 100 μM, or about 100 nM to about 10 μM, or about 100 nM to about 1 μM, or about 1 nM to about 100 μM, or about 10 nM to about 100 μM, or about 1 μM to about 100 μM, or about 10 μM to about 100 μM. In certain embodiments, antibodies herein exhibit affinities for C1q that are greater than 1 μM, greater than 5 μM, greater than 10 μM, greater than 25 μM, greater than 50 μM, or greater than 100 μM.

[0183] In some embodiments, antibodies comprising Fc regions described herein exhibit decreased CDC activities as compared to an unmodified antibody (e.g., human IgG1). In some embodiments, antibodies herein exhibit CDC activities that are at least 2-fold, or at least 3-fold, or at least 5-fold or at least 10-fold or at least 50-fold or at least 100-fold less than that of an unmodified antibody. In some embodiments, antibodies herein exhibit CDC activities that are reduced by at least 10%, or at least 20%, or by at least 30%, or by at least 40%, or by at least 50%, or by at least 60%, or by at least 70%, or by at least 80%, or by at least 90%, or by at least 100%, or by at least 200%, or by at least 300%, or by at least 400%, or by at least 500% relative to an unmodified antibody. In certain embodiments, antibodies herein exhibit no detectable CDC activities. In some embodiments, the reduction and/or ablatement of CDC activity may be attributed to the reduced affinity antibodies of the invention exhibit for Fc ligands and/or receptors.

[0184] Accordingly, further provided and described herein are anti-TL1A antibodies comprising a variant (e.g. harboring mutations) Fc region that reduce the cytotoxic response (e.g. ADCC or CDC) elicited by an anti-TL1A antibody.

[0185] In various embodiments, monoclonal antibodies are prepared using methods known in the art, such as, but not limited to the hybridoma method, where a host animal is immunized to elicit the production by lymphocytes of antibodies that will specifically bind to an immunizing antigen (Kohler and Milstein (1975) Nature 256:495). Hybridomas produce monoclonal antibodies directed specifically against a chosen antigen. The monoclonal antibodies are purified from the culture medium or ascites fluid by techniques known in the art, when propagated either in vitro or in vivo.

[0186] In some embodiments, monoclonal antibodies are made using recombinant DNA methods. The polynucleotides encoding a monoclonal antibody are isolated from mature B-cells or hybridoma cells. The isolated polynucleotides encoding the heavy and light chains are then cloned into suitable expression vectors, which when transfected into host cells (e.g., E. coli cells, simian COS cells, Chinese hamster ovary (CHO) cells, or myeloma cells) generate monoclonal antibodies. The polynucleotide(s) encoding a monoclonal antibody can further be modified in a number of different manners using recombinant DNA technology to generate alternative antibodies.

[0187] In various embodiments, a chimeric antibody, a molecule in which different portions are derived from different animal species, such as those having a variable region derived from a murine monoclonal antibody and a human immunoglobulin constant region (e.g., humanized antibodies) can be generated.

[0188] In some embodiments, the anti-TL1A monoclonal antibody is a humanized antibody, to reduce antigenicity and HAMA (human anti-mouse antibody) responses when administered to a human subject. Humanized antibodies can be produced using various techniques known in the art. For example, an antibody is humanized by (1) determining the nucleotide and predicted amino acid sequence of the starting antibody light and heavy variable domains; (2) designing the humanized antibody, e.g., deciding which antibody framework region to use during the humanizing process; (3) the actual humanizing methodologies/techniques; and (4) the transfection and expression of the humanized antibody. In various embodiments, a humanized antibody can be further optimized to decrease potential immunogenicity, while maintaining functional activity, for therapy in humans.

[0189] Humanized antibodies can also be made in transgenic mice containing human immunoglobulin loci that are capable, upon immunization, of producing the full repertoire of human antibodies in the absence of endogenous immunoglobulin production. A humanized antibody may also be obtained by a genetic engineering approach that enables production of affinity-matured human-like polyclonal antibodies in large animals.

[0190] A fully humanized antibody may be created by first designing a variable region amino acid sequence that contains non-human, e.g., rodent-derived CDRs, embedded in human-derived framework sequences. The non-human CDRs provide the desired specificity. Accordingly, in some cases these residues are included in the design of the reshaped variable region essentially unchanged. In some cases, modifications should therefore be restricted to a minimum and closely watched for changes in the specificity and affinity of the antibody. On the other hand, framework residues in theory can be derived from any human variable region. A human framework sequences should be chosen, which is equally suitable for creating a reshaped variable region and for retaining antibody affinity, in order to create a reshaped antibody which shows an acceptable or an even improved affinity. The human framework may be of germline origin, or may be derived from non-germline (e.g., mutated or affinity matured) sequences. Genetic engineering techniques well known to those in the art, for example, but not limited to, phage display of libraries of human antibodies, transgenic mice, human-human hybridoma, hybrid hybridoma, B cell immortalization and cloning, single-cell RT-PCR or HuRAb Technology, may be used to generate a humanized antibody with a hybrid DNA sequence containing a human framework and a non-human CDR.

[0191] In certain embodiments, the anti-TL1A antibody is a human antibody. Human antibodies can be directly prepared using various techniques known in the art. Immortalized human B lymphocytes immunized in vitro or isolated from an immunized individual that produce an antibody directed against a target antigen can be generated.

[0192] Chimeric, humanized and human antibodies may be produced by recombinant expression. Recombinant polynucleotide constructs typically include an expression control sequence operably linked to the coding sequences of antibody chains, including naturally associated or heterologous promoter regions. In certain embodiments, it may be desirable to generate amino acid sequence variants of these humanized antibodies, particularly where these improve the binding affinity or other biological properties of the antibody.

[0193] In certain embodiments, an antibody fragment is used to treat and/or ameliorate IBD. Various techniques are known for the production of antibody fragments. Generally, these fragments are derived via proteolytic digestion of intact antibodies (for example Morimoto et al., 1993, Journal of Biochemical and Biophysical Methods 24:107-117; Brennan et al., 1985, Science, 229:81). Fab, Fv, and scFv antibody fragments can all be expressed in and secreted from E. coli or other host cells, thus allowing the production of large amounts of these fragments. Other techniques for the production of antibody fragments will be apparent to the skilled practitioner.

[0194] According to the present disclosure, techniques can be adapted for the production of single-chain antibodies specific to TL1A. In addition, methods can be adapted for the construction of Fab expression libraries to allow rapid and effective identification of monoclonal Fab fragments with the desired specificity for TL1A, or derivatives, fragments, analogs or homologs thereof. Antibody fragments may be produced by techniques in the art including, but not limited to: (a) a F(ab′)₂ fragment produced by pepsin digestion of an antibody molecule; (b) a Fab fragment generated by reducing the disulfide bridges of an F(ab′)₂ fragment, (c) a Fab fragment generated by the treatment of the antibody molecule with papain and a reducing agent, and (d) Fv fragments.

[0195] Also provided herein are modified antibodies comprising any type of variable region that provides for the association of the antibody with TL1A. Those skilled in the art will appreciate that the modified antibodies may comprise antibodies (e.g., full-length antibodies or immunoreactive fragments thereof) in which at least a fraction of one or more of the constant region domains has been deleted or otherwise altered so as to provide desired biochemical characteristics such as decreasing TL1A. In certain embodiments, the variable regions in both the heavy and light chains are altered by at least partial replacement of one or more CDRs and, if necessary, by partial framework region replacement and sequence changing. In some embodiments, the replaced CDRs may be derived from an antibody of the same class, subclass, from an antibody of a different class, for instance, from an antibody from a different species and/or a combination thereof. In some embodiments, the constant region of the modified antibodies will comprise a human constant region. Modifications to the constant region compatible with this disclosure comprise additions, deletions or substitutions of one or more amino acids in one or more domains.

[0196] In various embodiments, the expression of an antibody or antigen-binding fragment thereof as described herein can occur in either prokaryotic or eukaryotic cells. Suitable hosts include bacterial or eukaryotic hosts, including yeast, insects, fungi, bird and mammalian cells either in vivo, or in situ, or host cells of mammalian, insect, bird or yeast origin. The mammalian cell or tissue can be of human, primate, hamster, rabbit, rodent, cow, pig, sheep, horse, goat, dog or cat origin, but any other mammalian cell may be used. In other embodiments, the antibody or antigen-fragment thereof as described herein may be transfected into the host.

[0197] In some embodiments, the expression vectors are transfected into the recipient cell line for the production of the chimeric, humanized, or composite human antibodies described herein. In various embodiments, mammalian cells can be useful as hosts for the production of antibody proteins, which can include, but are not limited to cells of fibroblast origin, such as Vero (ATCC CRL 81) or CHO-K1 (ATCC CRL 61) cells, HeLa cells and L cells. Exemplary eukaryotic cells that can be used to express polypeptides include, but are not limited to, COS cells, including COS 7 cells; 293 cells, including 293-6E cells; CHO cells, including CHO-S and DG44 cells; PER.C6™ cells (Crucell); and NSO cells. In some embodiments, a particular eukaryotic host cell is selected based on its ability to make desired post-translational modifications to the heavy chains and/or light chains.

[0198] A number of suitable host cell lines capable of secreting intact heterologous proteins have been developed in the art, and include, but are not limited to CHO cell lines, various COS cell lines, HeLa cells, L cells and multiple myeloma cell lines.

[0199] An expression vector carrying a chimeric, humanized, or composite human antibody construct, antibody or antigen-binding fragment thereof as described herein can be introduced into an appropriate host cell by any of a variety of suitable means, depending on the type of cellular host including, but not limited to transformation, transfection, lipofection, conjugation, electroporation, direct microinjection, and microprojectile bombardment, as known to one of ordinary skill in the art. Expression vectors for these cells can include expression control sequences, such as an origin of replication sites, a promoter, an enhancer and necessary processing information sites, such as ribosome binding sites, RNA splice sites, polyadenylation sites, and transcriptional terminator sequences.

[0200] In various embodiments, yeast can also be utilized as hosts for the production of the antibody molecules or peptides described herein. In various other embodiments, bacterial strains can also be utilized as hosts for the production of the antibody molecules or peptides described herein. Examples of bacterial strains include, but are not limited to E. coli, Bacillus species, enterobacteria, and various Pseudomonas species.

[0201] In some embodiments, one or more antibodies or antigen-binding fragments thereof as described herein can be produced in vivo in an animal that has been engineered (transgenic) or transfected with one or more nucleic acid molecules encoding the polypeptides, according to any suitable method. For production of transgenic animals, transgenes can be microinjected into fertilized oocytes, or can be incorporated into the genome of embryonic stem cells, and the nuclei of such cells transferred into enucleated oocytes. Once expressed, antibodies can be purified according to standard procedures of the art, including HPLC purification, column chromatography, gel electrophoresis and the like (see generally, Scopes, Protein Purification (Springer-Verlag, NY, 1982)).

[0202] Once expressed in the host, the whole antibodies, antibody-fragments (e.g., individual light and heavy chains), or other immunoglobulin forms of the present disclosure can be recovered and purified by known techniques, e.g., immunoabsorption or immunoaffinity chromatography, chromatographic methods such as HPLC (high performance liquid chromatography), ammonium sulfate precipitation, gel electrophoresis, or any combination of these. See generally, Scopes, PROTEIN PURIF. (Springer-Verlag, NY, 1982). Substantially pure immunoglobulins of at least about 90% to 95% homogeneity are advantageous, as are those with 98% to 99% or more homogeneity, particularly for pharmaceutical uses. Once purified, partially or to homogeneity as desired, a humanized or composite human antibody can then be used therapeutically or in developing and performing assay procedures, immunofluorescent stainings, etc. See generally, Vols. I & II Immunol. Meth. (Lefkovits & Pernis, eds., Acad. Press, NY, 1979 and 1981).

[0203] Various embodiments provide for a genetic construct comprising a nucleic acid encoding an anti-TL1A antibody or fragment provided herein. Genetic constructs of the antibody can be in the form of expression cassettes, which can be suitable for expression of the encoded anti-TL1A antibody or fragment. The genetic construct may be introduced into a host cell with or without being incorporated in a vector. For example, the genetic construct can be incorporated within a liposome or a virus particle. Alternatively, a purified nucleic acid molecule can be inserted directly into a host cell by methods known in the art. The genetic construct can be introduced directly into cells of a host subject by transfection, infection, electroporation, cell fusion, protoplast fusion, microinjection or ballistic bombardment.

[0204] Various embodiments provide a recombinant vector comprising the genetic construct of an antibody provided herein. The recombinant vector can be a plasmid, cosmid or phage. The recombinant vectors can include other functional elements; for example, a suitable promoter to initiate gene expression.

[0205] Various embodiments provide a host cell comprising a genetic construct and/or recombinant vector described herein.

[0206] Various host systems are also advantageously employed to express recombinant protein. Examples of suitable mammalian host cell lines include the COS-7 lines of monkey kidney cells, and other cell lines capable of expressing an appropriate vector including, for example, L cells, C127, 3T3, Chinese hamster ovary (CHO), HeLa and BHK cell lines. Mammalian expression vectors can comprise non-transcribed elements such as an origin of replication, a suitable promoter and enhancer linked to the gene to be expressed, and other 5′ or 3′ flanking non-transcribed sequences, and 5′ or 3′ non-translated sequences, such as necessary ribosome binding sites, a polyadenylation site, splice donor and acceptor sites, and transcriptional termination sequences.

[0207] The proteins produced by a transformed host can be purified according to any suitable method. Such standard methods include chromatography (e.g., ion exchange, affinity and sizing column chromatography), centrifugation, differential solubility, or by any other standard technique for protein purification. Affinity tags such as hexahistidine (SEQ ID NO: 1303), maltose binding domain, influenza coat sequence and glutathione-S-transferase can be attached to the protein to allow easy purification by passage over an appropriate affinity column. Isolated proteins can also be physically characterized using such techniques as proteolysis, nuclear magnetic resonance and x-ray crystallography. Recombinant protein produced in bacterial culture can be isolated.

[0208] One of skill will recognize that individual substitutions, deletions or additions to a nucleic acid, peptide, polypeptide, or protein sequence which alters a single amino acid or a small percentage of amino acids in the encoded sequence is a “conservatively modified variant” where the alteration results in the substitution of an amino acid with a chemically similar amino acid and retain the ability to specifically bind the target antigen. Such conservatively modified variants are in addition to and do not exclude polymorphic variants, interspecies homologs, and alleles consistent with the disclosure.

[0209] A given amino acid can be replaced by a residue having similar physiochemical characteristics, e.g., substituting one aliphatic residue for another (such as He, Val, Leu, or Ala for one another), or substitution of one polar residue for another (such as between Lys and Arg; Glu and Asp; or Gln and Asn). Other such conservative substitutions, e.g., substitutions of entire regions having similar hydrophobicity characteristics, are well known. Polypeptides comprising conservative amino acid substitutions can be tested in any one of the assays described herein to confirm that a desired activity, e.g. antigen-binding activity and specificity of a native or reference polypeptide is retained.

[0210] Particular conservative substitutions include, for example; Ala into Gly or into Ser; Arg into Lys; Asn into Gin or into H is; Asp into Glu; Cys into Ser; Gin into Asn; Glu into Asp; Gly into Ala or into Pro; His into Asn or into Gin; lie into Leu or into Val; Leu into lie or into Val; Lys into Arg, into Gin or into Glu; Met into Leu, into Tyr or into lie; Phe into Met, into Leu or into Tyr; Ser into Thr; Thr into Ser; Trp into Tyr; Tyr into Trp; and/or Phe into Val, into lie or into Leu.

[0211] In some embodiments, the antibody and/or antigen-binding fragment thereof described herein can be a variant of a sequence described herein, e.g., a conservative substitution variant of an antibody polypeptide. In some embodiments, the variant is a conservatively modified variant. A variant may refer to a polypeptide substantially homologous to a native or reference polypeptide, but which has an amino acid sequence different from that of the native or reference polypeptide because of one or a plurality of deletions, insertions or substitutions. Variant polypeptide-encoding DNA sequences encompass sequences that comprise one or more additions, deletions, or substitutions of nucleotides when compared to a native or reference DNA sequence, but that encode a variant protein or fragment thereof that retains activity, e.g., antigen-specific binding activity for the relevant target polypeptide.

[0212] Alterations of the native amino acid sequence can be accomplished by any of a number of techniques known to one of skill in the art. Mutations can be introduced at particular loci or by oligonucleotide-directed site-specific mutagenesis procedures. Techniques for making such alterations are very well established and include, for example, those disclosed by Walder et al. (Gene 42: 133, 1986); Bauer et al. (Gene 37:73, 1985); Craik (BioTechniques, January 1985, 12-19); Smith et al. (Genetic Engineering: Principles and Methods, Plenum Press, 1981).

[0213] Nucleic acid molecules encoding amino acid sequence variants of antibodies are prepared by a variety of methods known in the art. These methods include, but are not limited to, preparation by oligonucleotide-mediated (or site-directed) mutagenesis, PCR mutagenesis, and cassette mutagenesis of an earlier prepared variant or a non-variant version of the antibody. A nucleic acid sequence encoding at least one antibody, portion or polypeptide as described herein can be recombined with vector DNA in accordance with conventional techniques, including but not limited to, blunt-ended or staggered-ended termini for ligation and restriction enzyme digestion. Techniques for such manipulations are disclosed, e.g., by Maniatis et al., Molecular Cloning, Lab. Manual (Cold Spring Harbor Lab. Press, NY, 1982 and 1989), and can be used to construct nucleic acid sequences which encode a monoclonal antibody molecule or antigen-binding region.

[0214] In some embodiments, a nucleic acid encoding an antibody or antigen-binding fragment thereof as described herein is comprised by a vector. In some of the aspects described herein, a nucleic acid sequence encoding an antibody or antigen-binding fragment thereof as described herein, or any module thereof, is operably linked to a vector. The term “vector,” as used herein, refers to a nucleic acid construct designed for delivery to a host cell or for transfer between different host cells. As used herein, a vector can be viral or non-viral. The term “vector” encompasses any genetic element that is capable of replication when associated with the proper control elements and that can transfer gene sequences to cells. A vector can include, but is not limited to, a cloning vector, an expression vector, a plasmid, phage, transposon, cosmid, chromosome, virus, virion, etc.

[0215] As used herein, the term “expression vector” refers to a vector that directs expression of an RNA or polypeptide from sequences linked to transcriptional regulatory sequences on the vector. The term “expression” refers to the cellular processes involved in producing RNA and proteins and as appropriate, secreting proteins, including where applicable, but not limited to, for example, transcription, transcript processing, translation and protein folding, modification and processing. “Expression products” include RNA transcribed from a gene, and polypeptides obtained by translation of mRNA transcribed from a gene. The term “gene” means the nucleic acid sequence which is transcribed (DNA) to RNA in vitro or in vivo when operably linked to appropriate regulatory sequences. The gene may or may not include regions preceding and following the coding region, e.g., 5′ untranslated (5′UTR) or “leader” sequences and 3′ UTR or “trailer” sequences, as well as intervening sequences (introns) between individual coding segments (exons).

[0216] As used herein, the term “viral vector” refers to a nucleic acid vector construct that includes at least one element of viral origin and has the capacity to be packaged into a viral vector particle. The viral vector can contain the nucleic acid encoding an antibody or antigen-binding portion thereof as described herein in place of non-essential viral genes. The vector and/or particle may be utilized for the purpose of transferring any nucleic acids into cells either in vitro or in vivo. Numerous forms of viral vectors are known in the art.

[0217] By “recombinant vector,” it is meant that the vector includes a heterologous nucleic acid sequence, or “transgene” that is capable of expression in vivo.

[0218] Non-limiting methods for determining whether an anti-TL1A antibody binds to the same region of a reference antibody are known in the art. An exemplary method comprises a competition assay. For instance, the method comprises determining whether a reference antibody can compete with binding between the reference antibody and the TL1A protein or portion thereof, or determining whether the reference antibody can compete with binding between the reference antibody and the TL1A protein or portion thereof. Exemplary methods include use of surface plasmon resonance to evaluate whether an anti-TL1A antibody can compete with the binding between TL1A and another anti-TL1A antibody. In some cases, surface plasmon resonance is utilized in the competition assay.

TABLE 2A
CDR amino acid sequences

| SEQ | | |
|---|---|---|
| ID | | |
| NO | Description | Sequence |
| 1 | P HCDR1 | GFDIQDTYMH |
| 601 | P HCDR1 | DTYMH |
| 602 | P HCDR1 | KYDIN |
| 603 | P HCDR1 | GFEIQDTYMH |
| 604 | P HCDR1 | GFDPQDTYMH |
| 605 | P HCDR1 | GFDVQDTYMH |
| 606 | P HCDR1 | GFDIGDTYMH |
| 607 | P HCDR1 | GFDISDTYMH |
| 608 | P HCDR1 | GFDIVDTYMH |
| 609 | P HCDR1 | GFDIQDAYMH |
| 610 | P HCDR1 | GFDIQDSYMH |
| 611 | P HCDR1 | GFDIQDTFMH |
| 612 | P HCDR1 | GFDIQDTYIH |
| 613 | P HCDR1 | GFDLQDTYMH |
| 614 | P HCDR1 | GFDIQDTYLH |
| 615 | P HCDR1 | GFDIGDTFIH |
| 616 | P HCDR1 | GFDIGDTFMH |
| 617 | P HCDR1 | GFDIGDTYIH |
| 618 | P HCDR1 | GFDIQDTFIH |
| 619 | P HCDR1 | GFDIQDTFMH |
| 620 | P HCDR1 | GFDIQDTYIH |
| 621 | P HCDR1 | GFDISDTFIH |
| 622 | P HCDR1 | GFDISDTFMH |
| 623 | P HCDR1 | GFDISDTYIH |
| 624 | P HCDR1 | GFDISDTYMH |
| 625 | P HCDR1 | GFDIVDTFIH |
| 626 | P HCDR1 | GFDIVDTFMH |
| 627 | P HCDR1 | GFDIVDTYIH |
| 628 | P HCDR1 | GFDPGDTFIH |
| 629 | P HCDR1 | GFDPGDTFMH |
| 630 | P HCDR1 | GFDPGDTYIH |
| 631 | P HCDR1 | GFDPGDTYMH |
| 632 | P HCDR1 | GFDPQDTFIH |
| 633 | P HCDR1 | GFDPQDTFMH |
| 634 | P HCDR1 | GFDPQDTYIH |
| 635 | P HCDR1 | GFDPQDTYMH |
| 636 | P HCDR1 | GFDPSDTFIH |
| 637 | P HCDR1 | GFDPSDTFMH |
| 638 | P HCDR1 | GFDPSDTYIH |
| 639 | P HCDR1 | GFDPSDTYMH |
| 640 | P HCDR1 | GFDPVDTFIH |
| 641 | P HCDR1 | GFDPVDTFMH |
| 642 | P HCDR1 | GFDPVDTYIH |
| 643 | P HCDR1 | GFDPVDTYMH |
| 644 | P HCDR1 | GFDVGDTFIH |
| 645 | P HCDR1 | GFDVGDTFMH |
| 646 | P HCDR1 | GFDVGDTYIH |
| 647 | P HCDR1 | GFDVGDTYMH |
| 648 | P HCDR1 | GFDVQDTFIH |
| 649 | P HCDR1 | GFDVQDTFMH |
| 650 | P HCDR1 | GFDVQDTYIH |
| 651 | P HCDR1 | GFDVSDTFIH |
| 652 | P HCDR1 | GFDVSDTFMH |
| 653 | P HCDR1 | GFDVSDTYIH |
| 654 | P HCDR1 | GFDVSDTYMH |
| 655 | P HCDR1 | GFDVVDTFIH |
| 656 | P HCDR1 | GFDVVDTFMH |
| 657 | P HCDR1 | GFDVVDTYIH |
| 658 | P HCDR1 | GFDVVDTYMH |
| 659 | P HCDR1 | GFEIGDTFIH |
| 660 | P HCDR1 | GFEIGDTFMH |
| 661 | P HCDR1 | GFEIGDTYIH |
| 662 | P HCDR1 | GFEIGDTYMH |
| 663 | P HCDR1 | GFEIQDTFIH |
| 664 | P HCDR1 | GFEIQDTFMH |
| 665 | P HCDR1 | GFEIQDTYIH |
| 666 | P HCDR1 | GFEIQDTYMH |
| 667 | P HCDR1 | GFEISDTFIH |
| 668 | P HCDR1 | GFEISDTFMH |
| 669 | P HCDR1 | GFEISDTYIH |
| 670 | P HCDR1 | GFEISDTYMH |
| 671 | P HCDR1 | GFEIVDTFIH |
| 672 | P HCDR1 | GFEIVDTFMH |
| 673 | P HCDR1 | GFEIVDTYIH |
| 674 | P HCDR1 | GFEIVDTYMH |
| 675 | P HCDR1 | GFEPGDTFIH |
| 676 | P HCDR1 | GFEPGDTFMH |
| 677 | P HCDR1 | GFEPGDTYIH |
| 678 | P HCDR1 | GFEPGDTYMH |
| 679 | P HCDR1 | GFEPQDTFIH |
| 680 | P HCDR1 | GFEPQDTFMH |
| 681 | P HCDR1 | GFEPQDTYIH |
| 682 | P HCDR1 | GFEPQDTYMH |
| 683 | P HCDR1 | GFEPSDTFIH |
| 684 | P HCDR1 | GFEPSDTFMH |
| 685 | P HCDR1 | GFEPSDTYIH |
| 686 | P HCDR1 | GFEPSDTYMH |
| 687 | P HCDR1 | GFEPVDTFIH |
| 688 | P HCDR1 | GFEPVDTFMH |
| 689 | P HCDR1 | GFEPVDTYIH |
| 690 | P HCDR1 | GFEPVDTYMH |
| 691 | P HCDR1 | GFEVGDTFIH |
| 692 | P HCDR1 | GFEVGDTFMH |
| 693 | P HCDR1 | GFEVGDTYIH |
| 694 | P HCDR1 | GFEVGDTYMH |
| 695 | P HCDR1 | GFEVQDTFIH |
| 696 | P HCDR1 | GFEVQDTFMH |
| 697 | P HCDR1 | GFEVQDTYIH |
| 698 | P HCDR1 | GFEVQDTYMH |
| 699 | P HCDR1 | GFEVSDTFIH |
| 700 | P HCDR1 | GFEVSDTFMH |
| 701 | P HCDR1 | GFEVSDTYIH |
| 702 | P HCDR1 | GFEVSDTYMH |
| 703 | P HCDR1 | GFEVVDTFIH |
| 704 | P HCDR1 | GFEVVDTFMH |
| 705 | P HCDR1 | GFEVVDTYIH |
| 706 | P HCDR1 | GFEVVDTYMH |
| 707 | P HCDR1 | GFX₁X₂X₃DX₄X₅X₆H |
| | | X1 = D or E |
| | | X2 = 1, L, P, or V |
| | | X3 = G, Q, S, or V |
| | | X4 = A, S, T |
| | | X5 = F or Y |
| | | X6 = I, L, or M |
| 708 | P HCDR1 | GFX₁X₂X₃DTX₄X₅H |
| | | X₁ = D, OR E |
| | | X₂ = I, P, OR V |
| | | X₃ = G, Q, S, OR V |
| | | X₄ = F, OR Y |
| | | X₅ = I, OR M |
| 709 | M1 HCDR1 | GFTFSSYW |
| 710 | M2 HCDR1 | GGSFTGFY |
| 711 | M3 HCDR1 | GY(X1)F(X2)(X3)YGIS; |
| | | X1 = P, S, D, Q, N; X2 = |
| | | T, R; X3 = N, T, Y, H |
| 712 | M3 HCDR1 | GYDFTYYGIS |
| 713 | M4 HCDR1 | SRSYYWG |
| 714 | MS HCDR1 | TSNMGVV |
| 715 | M6 HCDR1 | LYGMN |
| 716 | M6 HCDR1 | NYGMN |
| 717 | M7 HCDR1 | GYTFTSSWMH |
| 718 | M8 HCDR1 | GYTFTSYDIN |
| 719 | M9 HCDR1 | SYFWS |
| 720 | M10 HCDR1 | GYYWN |
| 721 | M11 HCDR1 | GFTFSTYG |
| 722 | M12 HCDR1 | TYGMS |
| 2 | P HCDR2 | RIDPASGHTKYDPKFQV |
| 3 | P HCDR2 | RIEPASGHIKYDPKFQG |
| 4 | P HCDR2 | RIDPASGHIKYDPKFQG |
| 5 | P HCDR2 | RIEPASGHIKYDPKFQV |
| 723 | P HCDR2 | WIFPGDGRTDYNEKFKG |
| 724 | P HCDR2 | RLDPASGHTK |
| 725 | P HCDR2 | RIEPASGHTK |
| 726 | P HCDR2 | RIDPESGHTK |
| 727 | P HCDR2 | RIDPASGHTK |
| 728 | P HCDR2 | RIDPAGGHTK |
| 729 | P HCDR2 | RIDPASAHTK |
| 730 | P HCDR2 | RIDPASGHIK |
| 731 | P HCDR2 | RIDPASGHLK |
| 732 | P HCDR2 | RIDPASGHVK |
| 733 | P HCDR2 | YDPKFQV |
| 734 | P HCDR2 | IDPKFQV |
| 735 | P HCDR2 | LDPKFQV |
| 736 | P HCDR2 | MDPKFQV |
| 737 | P HCDR2 | SDPKFQV |
| 738 | P HCDR2 | TDPKFQV |
| 739 | P HCDR2 | VDPKFQV |
| 740 | P HCDR2 | YIPKFQV |
| 741 | P HCDR2 | YNPKFQV |
| 742 | P HCDR2 | YRPKFQV |
| 743 | P HCDR2 | YSPKFQV |
| 744 | P HCDR2 | YDPKFRV |
| 745 | P HCDR2 | YDPKFQA |
| 746 | P HCDR2 | YDPKFQD |
| 747 | P HCDR2 | YDPKFQE |
| 748 | P HCDR2 | YDPKFQG |
| 749 | P HCDR2 | YDPKFQH |
| 750 | P HCDR2 | YDPKFQK |
| 751 | P HCDR2 | YDPKFQL |
| 752 | P HCDR2 | YDPKFQM |
| 753 | P HCDR2 | YDPKFQN |
| 754 | P HCDR2 | YDPKFQP |
| 755 | P HCDR2 | YDPKFQR |
| 756 | P HCDR2 | YDPKFQS |
| 757 | P HCDR2 | YDPKFQT |
| 758 | P HCDR2 | RIEPASGHIKYDPKFQG |
| 759 | P HCDR2 | RIEPASGHIKYSPKFQG |
| 760 | P HCDR2 | RIEPASGHVKYSPKFQV |
| 761 | P HCDR2 | RIEPASGHVKYDPKFQT |
| 762 | P HCDR2 | RIDPASGHIKYDPKFQK |
| 763 | P HCDR2 | RIDPASGHVKIDPKFQV |
| 764 | P HCDR2 | RIDPASGHLKYDPKFQV |
| 765 | P HCDR2 | RIDPASGHLKYDPKFQR |
| 766 | P HCDR2 | RIDPASGHLKYDPKFQN |
| 767 | P HCDR2 | RIEPASGHLKYDPKFQE |
| 768 | P HCDR2 | PASGH |
| 769 | P HCDR2 | RIDPASGHTKYDPKFQV |
| 770 | P HCDR2 | RIDPASGHLKYDPKFQG |
| 771 | P HCDR2 | RIDPASGHTKYDPKFQG |
| 772 | P HCDR2 | RIDPASGHSKYDPKFQV |
| 773 | P HCDR2 | RIDPASGHYKYDPKFQV |
| 774 | P HCDR2 | RX₁X₂PX₃X₄X₅HX₆KX₇X₈PKFX₉X₁₀ |
| | | X1 = I or L |
| | | X2 = D or E |
| | | X3 = A or E |
| | | X4 = G or S |
| | | X5 = A or G |
| | | X6 = I, L, T, or V |
| | | X7 = I, L, M, S, T, V, or Y |
| | | X8 = D, I, N, R, or S |
| | | X9 = Q or R |
| | | X10 = A, D, E, G, H, K, L, |
| | | M, N, P, R, S, T, or V |
| 775 | M1 HCDR2 | IKEDGSEK |
| 776 | M2 HCDR2 | INHRGNT |
| 777 | M3 HCDR2 | WIS(X1)YNG(X2)(X3)(X4)YA(X5) |
| | | (X6) (X7)QG; X1 = T, P, S, |
| | | A; X2 = N, G, V, K, A; X3 = |
| | | T, K; X4 = H, N; X5 = Q, R; |
| | | X6 = K, M; X7 = L, H |
| 778 | M3 HCDR2 | WISTYNGNTHYARMLQG |
| 779 | M4 HCDR2 | SIYYNGRTYYNPSLKS |
| 780 | MS HCDR2 | HILWDDREYSNPALKS |
| 781 | M6 HCDR2 | WINTYTGEPTYADDFKG |
| 782 | M7 HCDR2 | IHPNSGGT |
| 783 | M8 HCDR2 | WLNPNSGXTG; X = N, Y |
| 784 | M9 HCDR2 | YIYYSGNTKYNPSLKS |
| 785 | M10 HCDR2 | EINHAGNTNYNPSLKS |
| 786 | M11 HCDR2 | ISGTGRTT |
| 787 | M12 HCDR2 | WMNTYSGVTTYADDFKG |
| 6 | P HCDR3 | SGGLPDV |
| 7 | P HCDR3 | ARSGGLPDV |
| 8 | P HCDR3 | SGGLPDW |
| 9 | P HCDR3 | ARSGGLPDW |
| 788 | P HCDR3 | YGPAMDY |
| 789 | P HCDR3 | LGGLPDV |
| 790 | P HCDR3 | SAGLPDV |
| 791 | P HCDR3 | SGGAPDV |
| 792 | P HCDR3 | SGGMPDV |
| 793 | P HCDR3 | SGGLPEV |
| 794 | P HCDR3 | SGGLPDK |
| 795 | P HCDR3 | SGGLPDM |
| 796 | P HCDR3 | SGGLPDQ |
| 797 | P HCDR3 | SGGLPDR |
| 798 | P HCDR3 | SGGLPDS |
| 799 | P HCDR3 | SGGLPDT |
| 800 | P HCDR3 | SGGLPDH |
| 801 | P HCDR3 | SGGLPDF |
| 802 | P HCDR3 | SGGSPDV |
| 803 | P HCDR3 | ARSGGLPDM |
| 804 | P HCDR3 | ARSGGLPDK |
| 805 | P HCDR3 | SGGLPD |
| 806 | P HCDR3 | ARSGGLPDF |
| 807 | P HCDR3 | ARSGGLPDL |
| 808 | P HCDR3 | SGGLPDE |
| 809 | P HCDR3 | SGGLPDI |
| 810 | P HCDR3 | SGGLPDK |
| 811 | P HCDR3 | SGGLPDL |
| 812 | P HCDR3 | SGGLPDM |
| 813 | P HCDR3 | SGGLPDQ |
| 814 | P HCDR3 | SGGLPDT |
| 815 | P HCDR3 | SGGLPDW |
| 816 | P HCDR3 | SGGLPDY |
| 817 | P HCDR3 | SGGMPDE |
| 818 | P HCDR3 | SGGMPDI |
| 819 | P HCDR3 | SGGMPDK |
| 820 | P HCDR3 | SGGMPDL |
| 821 | P HCDR3 | SGGMPDM |
| 822 | P HCDR3 | SGGMPDQ |
| 823 | P HCDR3 | SGGMPDT |
| 824 | P HCDR3 | SGGMPDV |
| 825 | P HCDR3 | SGGMPDW |
| 826 | P HCDR3 | SGGMPDY |
| 827 | P HCDR3 | X₁X₂GX₃PX₄X₅ |
| | | X1 = L or S |
| | | X2 = A or G |
| | | X3 = A, L, or M |
| | | X4 = D or E |
| | | X5 = K, M, Q, R, S, T, V, |
| | | or W |
| 828 | P HCDR3 | SGGX₁PDX₂ |
| | | X₁ = L, OR M |
| | | X₂ = E, I, K, L, M, Q, T, |
| | | V, W, OR Y |
| 829 | M1 HCDR3 | AREDYDSYYKYGMDV |
| 830 | M2 HCDR3 | ASPFYDFWSGSDY |
| 831 | M3 HCDR3 | ENYYGSG(X1)(X2)R GGMD(X3); |
| | | X1 = S, A; X2 = Y, P; X3 = |
| | | V, A, G |
| 832 | M3 HCDR3 | ENYYGSGAYRGGMDV |
| 833 | M4 HCDR3 | EDYGDYGAFDI |
| 834 | MS HCDR3 | MSRNYYGSSYVMDY |
| 835 | M6 HCDR3 | DTAMDYAMAY |
| 836 | M6 HCDR3 | DYGKYGDYYAMDY |
| 837 | M7 HCDR3 | ARGDYYGYVSWFAY |
| 838 | M8 HCDR3 | EVPETAAFEY |
| 839 | M9 HCDR3 | ETGSYYGFDY |
| 840 | M10 HCDR3 | GYCRSTTCYFDY |
| 841 | M11 HCDR3 | TKERGDYYYGVFDY |
| 842 | M12 HCDR3 | EGYVFDDYYATDY |
| 10 | P LCDR1 | RASSSVSYMY |
| 843 | P LCDR1 | RSSQTIVHSNGDTYLD |
| 844 | P LCDR1 | GASSSVSYMY |
| 845 | P LCDR1 | WASSSVSYMY |
| 846 | P LCDR1 | RASSSVIYMY |
| 847 | P LCDR1 | RASSSVSFMY |
| 848 | P LCDR1 | RASSSVSYLY |
| 849 | P LCDR1 | RASSSVSYMR |
| 850 | P LCDR1 | GASSSVSYMY |
| 851 | P LCDR1 | ASSSVSYMY |
| 852 | P LCDR1 | X₁ASSSVX₂X₃X₄X₅ |
| | | X1 = G, R, or W |
| | | X2 = I or S |
| | | X3 = F or Y |
| | | X4 = L or M |
| | | X5 = R or Y |
| 853 | M1 LCDR1 | QSILYSSNNKNY |
| 854 | M2 LCDR1 | QSLVHSDGNTY |
| 855 | M3 LCDR1 | RASQSVSSYLA |
| 856 | M4 LCDR1 | RASQGISSALA |
| 857 | MS LCDR1 | SASSSVNYMH |
| 858 | M6 LCDR1 | KSSQNIVHSDGNTYLE |
| 859 | M6 LCDR1 | RSSQSIVHSNGNTYLD |
| 860 | M7 LCDR1 | QNINVL |
| 861 | M8 LCDR1 | TSSSSDIGA(X1)(X2)GV(X3); |
| | | X1 = G, A; X2 = L, S, Q; |
| | | X3 = H, L |
| 862 | M9 LCDR1 | RASQSINNYLN |
| 863 | M10 LCDR1 | RASQSVRSSYLA |
| 864 | M11 LCDR1 | QTISSW |
| 865 | M12 LCDR1 | RSSQNIVHSDGNTYLE |
| 11 | P LCDR2 | ATSNLAS |
| 866 | P LCDR2 | KVSNRFS |
| 867 | P LCDR2 | AKSNLAS |
| 868 | P LCDR2 | ATPNLAS |
| 869 | P LCDR2 | ATENLAS |
| 870 | P LCDR2 | ATSLLAS |
| 871 | P LCDR2 | ATSPLAS |
| 872 | P LCDR2 | ATSNLTS |
| 873 | P LCDR2 | AX₁X₂X₃LX₄S |
| | | X1 = K or T |
| | | X2 = E, P, or S |
| | | X3 = L, N, or P |
| | | X4 = A or T |
| 874 | M1 LCDR2 | WAS |
| 875 | M2 LCDR2 | KIS |
| 876 | M3 LCDR2 | DASNRAT |
| 877 | M4 LCDR2 | DASSLES |
| 878 | M5 LCDR2 | STSNLAS |
| 879 | M6 LCDR2 | KVSNRFS |
| 880 | M7 LCDR2 | KAS |
| 881 | M8 LCDR2 | GYYNRPS |
| 882 | M9 LCDR2 | AASSLQS |
| 883 | M10 LCDR2 | GASSRAT |
| 884 | M11 LCDR2 | AAS |
| 885 | M12 LCDR2 | KVSNRFS |
| 12 | P LCDR3 | QQWEGNPRT |
| 13 | P LCDR3 | QQWKGNPRT |
| 14 | P LCDR3 | QQWSGNPRT |
| 15 | P LCDR3 | QQWSRNPRT |
| 886 | P LCDR3 | FQGSHVPYT |
| 887 | P LCDR3 | HQWSGNPRT |
| 888 | P LCDR3 | NQWSGNPRT |
| 889 | P LCDR3 | SQWSGNPRT |
| 890 | P LCDR3 | QQSSGNPRT |
| 891 | P LCDR3 | QQWDGNPRT |
| 892 | P LCDR3 | QQWHGNPRT |
| 893 | P LCDR3 | QQWNGNPRT |
| 894 | P LCDR3 | QQWQGNPRT |
| 895 | P LCDR3 | QQWVGNPRT |
| 896 | P LCDR3 | QQWSANPRT |
| 897 | P LCDR3 | QQWSDNPRT |
| 898 | P LCDR3 | QQWSQNPRT |
| 899 | P LCDR3 | QQWSSNPRT |
| 900 | P LCDR3 | QQWSGNPRS |
| 901 | P LCDR3 | QQFSGNPRT |
| 902 | P LCDR3 | QQHSGNPRT |
| 903 | P LCDR3 | QQISGNPRT |
| 904 | P LCDR3 | QQPSGNPRT |
| 905 | P LCDR3 | QQRSGNPRT |
| 906 | P LCDR3 | QQYSGNPRT |
| 907 | P LCDR3 | QQWSGHPRT |
| 908 | P LCDR3 | QQWSGLPRT |
| 909 | P LCDR3 | QQWSGQPRT |
| 910 | P LCDR3 | QQWSGSPRT |
| 911 | P LCDR3 | QQWSGTPRT |
| 912 | P LCDR3 | QQWSGMPRT |
| 913 | P LCDR3 | QQWSGFPRT |
| 914 | P LCDR3 | QQWSGKPRT |
| 915 | P LCDR3 | QQWSGRPRT |
| 916 | P LCDR3 | QQWSGDPRT |
| 917 | P LCDR3 | QQWAGNPRT |
| 918 | P LCDR3 | QQWYGNPRT |
| 919 | P LCDR3 | QQWFGNPRT |
| 920 | P LCDR3 | QQWQGNPRT |
| 921 | P LCDR3 | GNPRT |
| 922 | P LCDR3 | SQWSGNPRT |
| 923 | P LCDR3 | QQWSGNPRS |
| 924 | P LCDR3 | QQWSGTPRT |
| 925 | P LCDR3 | QQWSGDPRT |
| 926 | P LCDR3 | QQWSGFPRT |
| 927 | P LCDR3 | QQWSGKPRT |
| 928 | P LCDR3 | QQWSGRPRT |
| 929 | P LCDR3 | QQWSGSPRT |
| 930 | P LCDR3 | QQWDADPRT |
| 931 | P LCDR3 | QQWDAFPRT |
| 932 | P LCDR3 | QQWDAKPRT |
| 933 | P LCDR3 | QQWDANPRT |
| 934 | P LCDR3 | QQWDARPRT |
| 935 | P LCDR3 | QQWDASPRT |
| 936 | P LCDR3 | QQWDATPRT |
| 937 | P LCDR3 | QQWDGDPRT |
| 938 | P LCDR3 | QQWDGFPRT |
| 939 | P LCDR3 | QQWDGKPRT |
| 940 | P LCDR3 | QQWDGNPRT |
| 941 | P LCDR3 | QQWDGRPRT |
| 942 | P LCDR3 | QQWDGSPRT |
| 943 | P LCDR3 | QQWDGTPRT |
| 944 | P LCDR3 | QQWEADPRT |
| 945 | P LCDR3 | QQWEAFPRT |
| 946 | P LCDR3 | QQWEAKPRT |
| 947 | P LCDR3 | QQWEANPRT |
| 948 | P LCDR3 | QQWEARPRT |
| 949 | P LCDR3 | QQWEASPRT |
| 950 | P LCDR3 | QQWEATPRT |
| 951 | P LCDR3 | QQWEGDPRT |
| 952 | P LCDR3 | QQWEGFPRT |
| 953 | P LCDR3 | QQWEGKPRT |
| 954 | P LCDR3 | QQWEGRPRT |
| 955 | P LCDR3 | QQWEGSPRT |
| 956 | P LCDR3 | QQWEGTPRT |
| 957 | P LCDR3 | QQWHADPRT |
| 958 | P LCDR3 | QQWHAFPRT |
| 959 | P LCDR3 | QQWHAKPRT |
| 960 | P LCDR3 | QQWHANPRT |
| 961 | P LCDR3 | QQWHARPRT |
| 962 | P LCDR3 | QQWHASPRT |
| 963 | P LCDR3 | QQWHATPRT |
| 964 | P LCDR3 | QQWHGDPRT |
| 965 | P LCDR3 | QQWHGFPRT |
| 966 | P LCDR3 | QQWHGKPRT |
| 967 | P LCDR3 | QQWHGNPRT |
| 968 | P LCDR3 | QQWHGRPRT |
| 969 | P LCDR3 | QQWHGSPRT |
| 970 | P LCDR3 | QQWHGTPRT |
| 971 | P LCDR3 | QQWNADPRT |
| 972 | P LCDR3 | QQWNAFPRT |
| 973 | P LCDR3 | QQWNAKPRT |
| 974 | P LCDR3 | QQWNANPRT |
| 975 | P LCDR3 | QQWNARPRT |
| 976 | P LCDR3 | QQWNASPRT |
| 977 | P LCDR3 | QQWNATPRT |
| 978 | P LCDR3 | QQWNGDPRT |
| 979 | P LCDR3 | QQWNGFPRT |
| 980 | P LCDR3 | QQWNGKPRT |
| 981 | P LCDR3 | QQWNGNPRT |
| 982 | P LCDR3 | QQWNGRPRT |
| 983 | P LCDR3 | QQWNGSPRT |
| 984 | P LCDR3 | QQWNGTPRT |
| 985 | P LCDR3 | QQWQADPRT |
| 986 | P LCDR3 | QQWQAFPRT |
| 987 | P LCDR3 | QQWQAKPRT |
| 988 | P LCDR3 | QQWQANPRT |
| 989 | P LCDR3 | QQWQARPRT |
| 990 | P LCDR3 | QQWQASPRT |
| 991 | P LCDR3 | QQWQATPRT |
| 992 | P LCDR3 | QQWQGDPRT |
| 993 | P LCDR3 | QQWQGFPRT |
| 994 | P LCDR3 | QQWQGKPRT |
| 995 | P LCDR3 | QQWQGRPRT |
| 996 | P LCDR3 | QQWQGSPRT |
| 997 | P LCDR3 | QQWQGTPRT |
| 998 | P LCDR3 | QQWSADPRT |
| 999 | P LCDR3 | QQWSAFPRT |
| 1000 | P LCDR3 | QQWSAKPRT |
| 1001 | P LCDR3 | QQWSANPRT |
| 1002 | P LCDR3 | QQWSARPRT |
| 1003 | P LCDR3 | QQWSASPRT |
| 1004 | P LCDR3 | QQWSATPRT |
| 1005 | P LCDR3 | NQWDAFPRT |
| 1006 | P LCDR3 | NQWDAKPRT |
| 1007 | P LCDR3 | NQWDANPRT |
| 1008 | P LCDR3 | NQWDARPRT |
| 1009 | P LCDR3 | NQWDASPRT |
| 1010 | P LCDR3 | NQWDATPRT |
| 1011 | P LCDR3 | NQWDGDPRT |
| 1012 | P LCDR3 | NQWDGFPRT |
| 1013 | P LCDR3 | NQWDGKPRT |
| 1014 | P LCDR3 | NQWDGNPRT |
| 1015 | P LCDR3 | NQWDGRPRT |
| 1016 | P LCDR3 | NQWDGSPRT |
| 1017 | P LCDR3 | NQWDGTPRT |
| 1018 | P LCDR3 | NQWEADPRT |
| 1019 | P LCDR3 | NQWEAFPRT |
| 1020 | P LCDR3 | NQWEAKPRT |
| 1021 | P LCDR3 | NQWEANPRT |
| 1022 | P LCDR3 | NQWEARPRT |
| 1023 | P LCDR3 | NQWEASPRT |
| 1024 | P LCDR3 | NQWEATPRT |
| 1025 | P LCDR3 | NQWEGDPRT |
| 1026 | P LCDR3 | NQWEGFPRT |
| 1027 | P LCDR3 | NQWEGKPRT |
| 1028 | P LCDR3 | NQWEGNPRT |
| 1029 | P LCDR3 | NQWEGRPRT |
| 1030 | P LCDR3 | NQWEGSPRT |
| 1031 | P LCDR3 | NQWEGTPRT |
| 1032 | P LCDR3 | NQWHADPRT |
| 1033 | P LCDR3 | NQWHAFPRT |
| 1034 | P LCDR3 | NQWHAKPRT |
| 1035 | P LCDR3 | NQWHANPRT |
| 1036 | P LCDR3 | NQWHARPRT |
| 1037 | P LCDR3 | NQWHASPRT |
| 1038 | P LCDR3 | NQWHATPRT |
| 1039 | P LCDR3 | NQWHGDPRT |
| 1040 | P LCDR3 | NQWHGFPRT |
| 1041 | P LCDR3 | NQWHGKPRT |
| 1042 | P LCDR3 | NQWHGNPRT |
| 1043 | P LCDR3 | NQWHGRPRT |
| 1044 | P LCDR3 | NQWHGSPRT |
| 1045 | P LCDR3 | NQWHGTPRT |
| 1046 | P LCDR3 | NQWNADPRT |
| 1047 | P LCDR3 | NQWNAFPRT |
| 1048 | P LCDR3 | NQWNAKPRT |
| 1049 | P LCDR3 | NQWNANPRT |
| 1050 | P LCDR3 | NQWNARPRT |
| 1051 | P LCDR3 | NQWNASPRT |
| 1052 | P LCDR3 | NQWNATPRT |
| 1053 | P LCDR3 | NQWNGDPRT |
| 1054 | P LCDR3 | NQWNGFPRT |
| 1055 | P LCDR3 | NQWNGKPRT |
| 1056 | P LCDR3 | NQWNGNPRT |
| 1057 | P LCDR3 | NQWNGRPRT |
| 1058 | P LCDR3 | NQWNGSPRT |
| 1059 | P LCDR3 | NQWNGTPRT |
| 1060 | P LCDR3 | NQWQADPRT |
| 1061 | P LCDR3 | NQWQAFPRT |
| 1062 | P LCDR3 | NQWQAKPRT |
| 1063 | P LCDR3 | NQWQANPRT |
| 1064 | P LCDR3 | NQWQARPRT |
| 1065 | P LCDR3 | NQWQASPRT |
| 1066 | P LCDR3 | NQWQATPRT |
| 1067 | P LCDR3 | NQWQGDPRT |
| 1068 | P LCDR3 | NQWQGFPRT |
| 1069 | P LCDR3 | NQWQGKPRT |
| 1070 | P LCDR3 | NQWQGNPRT |
| 1071 | P LCDR3 | NQWQGRPRT |
| 1072 | P LCDR3 | NQWQGSPRT |
| 1073 | P LCDR3 | NQWQGTPRT |
| 1074 | P LCDR3 | NQWSADPRT |
| 1075 | P LCDR3 | NQWSAFPRT |
| 1076 | P LCDR3 | NQWSAKPRT |
| 1077 | P LCDR3 | NQWSANPRT |
| 1078 | P LCDR3 | NQWSARPRT |
| 1079 | P LCDR3 | NQWSASPRT |
| 1080 | P LCDR3 | NQWSATPRT |
| 1081 | P LCDR3 | NQWSGDPRT |
| 1082 | P LCDR3 | NQWSGFPRT |
| 1083 | P LCDR3 | NQWSGKPRT |
| 1084 | P LCDR3 | NQWSGNPRT |
| 1085 | P LCDR3 | NQWSGRPRT |
| 1086 | P LCDR3 | NQWSGSPRT |
| 1087 | P LCDR3 | NQWSGTPRT |
| 1088 | P LCDR3 | X₁QWX₂X₃X₄PRT |
| | | X₁ = Q, OR N |
| | | X₂ = D, E, H, N, Q, OR S |
| | | X₃ = A, OR G |
| | | X₄ = D, F, K, N, R, S, OR T |
| 1089 | P LCDR3 | X₁QX₂X₃X₄X₅PRX₆ |
| | | X1 = H, N, Q, or S |
| | | X2 = F, H, I, P, R, S, W, or |
| | | Y |
| | | X3 = D, E, H, N, Q, S, or V |
| | | X4 = A, D, G, Q, or S |
| | | X5 = D, F, H, K, L, M, N, Q, |
| | | R, S, or T |
| | | X6 = T or S |
| 1090 | M1 LCDR3 | QQYYSTPFT |
| 1091 | M2 LCDR3 | MQATQFPLT |
| 1092 | M3 LCDR3 | QQRSNWPWT |
| 1093 | M4 LCDR3 | QQFNSYPLT |
| 1094 | M5 LCDR3 | HQWNNYGT |
| 1095 | M6 LCDR3 | FQGSHVPLT |
| 1096 | M7 LCDR3 | QQGQSYPYT |
| 1097 | M8 LCDR3 | QSXDGTLSAL; X = Y, W, F |
| 1098 | M9 LCDR3 | QQSYSTPRT |
| 1099 | M10 LCDR3 | QQYGSSPT |
| 1100 | M11 LCDR3 | QQYHRSWT |
| 1101 | M12 LCDR3 | FQGSHVPLT |

TABLE 2B
Select antibody CDRs

| | Heavy Chain | Light Chain |
|---|---|---|
| | CDR SEQ ID NOS | CDR SEQ ID NOS |
| Antibody | (CDR1, CDR2, CDR3) | (CDR1, CDR2, CDR3) |
| A | 1, 2, 6 | 10, 11, 12 |
| B | 1, 3, 8 | 10, 11, 12 |
| C | 1, 4, 8 | 10, 11, 12 |
| D | 1, 2, 6 | 10, 11, 13 |
| E | 1, 2, 6 | 10, 11, 14 |
| F | 1, 5, 8 | 10, 11, 12 |
| G | 1, 5, 8 | 10, 11, 13 |
| H | 1, 3, 8 | 10, 11, 13 |
| A2 | 1, 2, 7 | 10, 11, 12 |
| B2 | 1, 3, 9 | 10, 11, 12 |
| C2 | 1, 4, 9 | 10, 11, 12 |
| D2 | 1, 2, 7 | 10, 11, 13 |
| E2 | 1, 2, 7 | 10, 11, 14 |
| F2 | 1, 5, 9 | 10, 11, 12 |
| G2 | 1, 5, 9 | 10, 11, 13 |
| H2 | 1, 3, 9 | 10, 11, 13 |
| I | 1, 5, 8 | 10, 11, 15 |
| I2 | 1, 5, 9 | 10, 11, 15 |

TABLE 2C
Variable Regions of Certain anti-TL1A Antibodies
As used herein, reference to A(number), refers to an antibody of this
table. For instance, A15 used herein refers to A15 in Table 2C.

| | Heavy Chain Variable | Light Chain Variable |
|---|---|---|
| Antibody | Region SEQ ID NO | Region SEQ ID NOS |
| A15 | 108 | 203 |
| A29 | 108 | 205 |
| A30 | 108 | 204 |
| A31 | 136 | 205 |
| A32 | 137 | 205 |
| A33 | 137 | 202 |
| A34 | 107 | 208 |
| A35 | 138 | 208 |
| A36 | 139 | 208 |
| A37 | 140 | 208 |
| A38 | 141 | 208 |
| A39 | 142 | 208 |
| A40 | 143 | 208 |
| A41 | 115 | 208 |
| A42 | 144 | 208 |
| A43 | 145 | 208 |
| A44 | 146 | 208 |
| A45 | 120 | 208 |
| A46 | 147 | 208 |
| A47 | 148 | 208 |
| A48 | 108 | 210 |
| A49 | 108 | 211 |
| A50 | 108 | 212 |
| A51 | 108 | 213 |
| A52 | 108 | 214 |
| A53 | 146 | 208 |
| A54 | 149 | 208 |
| A55 | 109 | 208 |
| A56 | 108 | 215 |
| A57 | 150 | 202 |
| A58 | 125 | 202 |
| A59 | 117 | 202 |
| A60 | 151 | 202 |
| A61 | 152 | 202 |
| A62 | 153 | 202 |
| A63 | 154 | 202 |
| A64 | 121 | 202 |
| A65 | 128 | 202 |
| A66 | 155 | 202 |
| A67 | 122 | 202 |
| A68 | 123 | 202 |
| A69 | 156 | 202 |
| A70 | 157 | 202 |
| A71 | 158 | 202 |
| A72 | 131 | 202 |
| A73 | 157 | 205 |
| A74 | 158 | 205 |
| A75 | 131 | 205 |
| A76 | 159 | 202 |
| A77 | 160 | 202 |
| A78 | 124 | 202 |
| A79 | 107 | 208 |
| A81 | 139 | 208 |
| A82 | 140 | 208 |
| A83 | 144 | 208 |
| A85 | 136 | 209 |
| A86 | 136 | 216 |
| A87 | 136 | 217 |
| A88 | 136 | 218 |
| A89 | 136 | 219 |
| A90 | 136 | 220 |
| A91 | 133 | 202 |
| A92 | 161 | 202 |
| A93 | 162 | 202 |
| A94 | 124 | 202 |
| A95 | 131 | 205 |
| A96 | 128 | 205 |
| A97 | 121 | 202 |
| A98 | 122 | 202 |
| A99 | 123 | 202 |
| A100 | 107 | 204 |
| A101 | 140 | 204 |
| A102 | 115 | 204 |
| A103 | 120 | 204 |
| A104 | 139 | 204 |
| A105 | 143 | 204 |
| A107 | 108 | 202 |
| A108 | 156 | 205 |
| A109 | 133 | 205 |
| A110 | 125 | 205 |
| A111 | 150 | 205 |
| A112 | 117 | 205 |
| A113 | 124 | 205 |
| A114 | 121 | 205 |
| A115 | 122 | 205 |
| A116 | 123 | 205 |
| A117 | 151 | 205 |
| A118 | 153 | 205 |
| A119 | 159 | 205 |
| A120 | 154 | 205 |
| A121 | 163 | 204 |
| A122 | 113 | 204 |
| A123 | 112 | 204 |
| A124 | 164 | 204 |
| A125 | 105 | 204 |
| A126 | 114 | 204 |
| A127 | 118 | 204 |
| A128 | 111 | 204 |
| A129 | 110 | 204 |
| A130 | 121 | 205 |
| A132 | 128 | 206 |
| A133 | 121 | 206 |
| A134 | 122 | 206 |
| A135 | 133 | 206 |
| A136 | 125 | 206 |
| A137 | 121 | 207 |
| A138 | 122 | 207 |
| A139 | 110 | 207 |
| A140 | 110 | 202 |
| A141 | 111 | 207 |
| A142 | 111 | 202 |
| A143 | 136 | 202 |
| A144 | 111 | 204 |
| A145 | 133 | 201 |
| A146 | 125 | 201 |
| A147 | 117 | 201 |
| A148 | 121 | 201 |
| A149 | 122 | 201 |
| A150 | 128 | 201 |
| A151 | 124 | 201 |
| A152 | 131 | 201 |
| A153 | 133 | 205 |
| A154 | 125 | 205 |
| A155 | 121 | 205 |
| A156 | 122 | 205 |
| A157 | 104 | 204 |
| A158 | 101 | 204 |
| A159 | 119 | 204 |
| A160 | 102 | 204 |
| A161 | 165 | 204 |
| A162 | 106 | 204 |
| A163 | 166 | 204 |
| A164 | 167 | 204 |
| A165 | 139 | 205 |
| A166 | 146 | 205 |
| A167 | 120 | 205 |
| A168 | 147 | 205 |
| A169 | 126 | 205 |
| A170 | 135 | 205 |
| A171 | 168 | 205 |
| A172 | 130 | 205 |
| A173 | 127 | 205 |
| A174 | 132 | 205 |
| A175 | 126 | 201 |
| A176 | 135 | 201 |
| A177 | 168 | 201 |
| A178 | 130 | 201 |
| A179 | 127 | 201 |
| A180 | 132 | 201 |
| A181 | 107 | 202 |
| A182 | 138 | 202 |
| A183 | 140 | 202 |
| A184 | 145 | 202 |
| A185 | 147 | 202 |
| A186 | 144 | 202 |
| A187 | 120 | 202 |
| A188 | 115 | 202 |
| A189 | 146 | 202 |
| A190 | 141 | 202 |
| A191 | 142 | 202 |
| A192 | 143 | 202 |
| A193 | 109 | 205 |
| A194 | 103 | 205 |
| A195 | 169 | 205 |
| A196 | 129 | 205 |
| A197 | 116 | 205 |
| A198 | 134 | 205 |
| A199 | 109 | 201 |
| A200 | 103 | 201 |
| A201 | 169 | 201 |
| A202 | 129 | 201 |
| A203 | 116 | 201 |
| A204 | 134 | 201 |
| A205 | 109 | 202 |
| A206 | 103 | 202 |
| A207 | 169 | 202 |
| A208 | 129 | 202 |
| A209 | 116 | 202 |
| A210 | 134 | 202 |
| A211 | 108 | 201 |
| A212 | 107 | 201 |
| A213 | 106 | 201 |
| A214 | 111 | 201 |
| A215 | 110 | 201 |
| A216 | 112 | 201 |
| A217 | 101 | 201 |
| A218 | 119 | 201 |
| A219 | 104 | 201 |
| A220 | 102 | 205 |
| A221 | 105 | 201 |
| A222 | 114 | 201 |
| A223 | 103 | 202 |
| A224 | 116 | 201 |
| A500 | 301 | 303 |
| A501 | 302 | 303 |

TABLE 2D
Heavy chain variable region (VH) amino acid sequences

| SEQ | | |
|---|---|---|
| ID | | |
| NO | Description | Sequence |
| 101 | 217 VH, 158 VH | QVQLVQSGAEVKKPGASVKVSCKASGFDIQDTYMHWVKQRPGQGLEW |
| | | MGRIDPASGHTKYDPKFQVRVTITRDTSTSTVYMELSSLRSEDTAVYYC |
| | | ARSGGLPDVWGQGTTVTVSS |
| 102 | 220 VH, 160 VH | QVQLVQSGAEVKKPGASVKVSCKASGFDIQDTYMHWVKQRPGQGLEW |
| | | MGRIDPASGHTKYDPKFQVRVTMTRDTSTSTAYLELSSLRSEDTAVYYC |
| | | ARSGGLPDVWGQGTTVTVSS |
| 103 | 223 VH, 200 VH, | EVQLVQSGAEVKKPGASVKVSCKASGFDIQDTYMHWVRQRPGQGLEWI |
| | 194 VL, 206 VH | GRIDPASGHTKYDPKFQVRATITTDTSTSTAYLELSSLRSEDTAVYYCAR |
| | | SGGLPDVWGQGTTVTVSS |
| 104 | 219 VH, 157 VH | QVQLVQSGAEVKKPGASVKVSCKASGFDIQDTYMHWVKQRPGQGLEW |
| | | MGRIDPASGHTKYDPKFQVRVTITRDTSTSTVYLELSSLRSEDTAVYYCA |
| | | RSGGLPDVWGQGTTVTVSS |
| 105 | 221 VH, 125 VH | QVQLVQSGAEVKKPGASVKVSCKASGFDIQDTYMHWVKQRPGQGLEW |
| | | MGRIDPASGHTKYDPKFQVRATITRDTSTSTAYLELSSLRSEDTAVYYCA |
| | | RSGGLPDVWGQGTTVTVSS |
| 106 | 213 VH, 162 VH | QVQLVQSGAEVKKPGASVKVSCKASGFDIQDTYMHWVRQRPGQGLEW |
| | | MGRIDPASGHTKYDPKFQVRVTITTDTSTSTVYMELSSLRSEDTAVYYCA |
| | | RSGGLPDVWGQGTTVTVSS |
| 107 | 212 VH, 100 VH, | QVQLVQSGAEVKKPGASVKVSCKASGFDIQDTYMHWVRQRPGQGLEWI |
| | 181 VH, 34 VH, 79 | GRIDPASGHTKYDPKFQVRATITTDTSTSTAYLELSSLRSEDTAVYYCAR |
| | VH | SGGLPDVWGQGTTVTVSS |
| 108 | 107 VH, 211 VH, 15 | QVQLVQSGAEVKKPGASVKVSCKASGFDIQDTYMHWVKQRPGQGLEWI |
| | VH, 30 VH, 29 VH, | GRIDPASGHTKYDPKFQVRATITTDTSTSTAYLELSSLRSEDTAVYYCAR |
| | 48 VH, 49 VH, 50 | SGGLPDVWGQGTTVTVSS |
| | VH, 51 VH, 52 VH, | |
| | 56 VH | |
| 109 | 205 VH, 199 VH, 55 | EVQLVQSGAEVKKPGASVKVSCKASGFDIQDTYMHWVKQRPGQGLEWI |
| | VH, 193 VH | GRIDPASGHTKYDPKFQVRATITTDTSTSTAYLELSSLRSEDTAVYYCAR |
| | | SGGLPDVWGQGTTVTVSS |
| 110 | 129 VH, 139 VH, | QVQLVQSGAEVKKPGASVKVSCKASGFDIQDTYMHWVRQRPGQGLEW |
| | 140 VH, 215 VH | MGRIDPASGHTKYDPKFQVRVTITTDTSTSTAYLELSSLRSEDTAVYYCA |
| | | RSGGLPDVWGQGTTVTVSS |
| 111 | 214 VH, 128 VH, | QVQLVQSGAEVKKPGASVKVSCKASGFDIQDTYMHWVRQRPGQGLEW |
| | 141 VH, 142 VH, | MGRIDPASGHTKYDPKFQVRVTITRDTSTSTAYLELSSLRSEDTAVYYCA |
| | 144 VH | RSGGLPDVWGQGTTVTVSS |
| 112 | 216 VH, 123 VH | QVQLVQSGAEVKKPGASVKVSCKASGFDIQDTYMHWVRQRPGQGLEWI |
| | | GRIDPASGHTKYDPKFQVRVTITRDTSTSTAYLELSSLRSEDTAVYYCAR |
| | | SGGLPDVWGQGTTVTVSS |
| 113 | 122 VH | QVQLVQSGAEVKKPGASVKVSCKASGFDIQDTYMHWVRQRPGQGLEWI |
| | | GRIDPASGHTKYDPKFQVRATITRDTSTSTAYLELSSLRSEDTAVYYCAR |
| | | SGGLPDVWGQGTTVTVSS |
| 114 | 222 VH, 126 VH | QVQLVQSGAEVKKPGASVKVSCKASGFDIQDTYMHWVKQRPGQGLEW |
| | | MGRIDPASGHTKYDPKFQVRVTITRDTSTSTAYLELSSLRSEDTAVYYCA |
| | | RSGGLPDVWGQGTTVTVSS |
| 115 | 188 VH, 41 VH, 102 | QVQLVQSGAEVKKPGASVKVSCKASGFDIQDTYMHWVKQRPGQGLEWI |
| | VH | GRIDPASGHTKYDPKFQVRVTITTDTSTSTAYLELSSLRSEDTAVYYCAR |
| | | SGGLPDVWGQGTTVTVSS |
| 116 | 203 VH, 197 VH, | EVQLVQSGAEVKKPGASVKVSCKASGFDIQDTYMHWVKQAPGQGLEW |
| | 209 VH, 224 VH | MGRIEPASGHIKYDPKFQGRVTMTRDTSTSTVYMELSSLRSEDTAVYYC |
| | | ARSGGLPDWWGQGTTVTVSS |
| 117 | 147 VH, 112 VH, 59 | QVQLVQSGAEVKKPGASVKVSCKASGFDIQDTYMHWVKQRPGQGLEW |
| | VH | MGRIEPASGHIKYDPKFQGRVTMTRDTSTSTVYMELSSLRSEDTAVYYC |
| | | ARSGGLPDWWGQGTTVTVSS |
| 118 | 127 VH | QVQLVQSGAEVKKPGASVKVSCKASGFDIQDTYMHWVKQRPGQGLEW |
| | | MGRIDPASGHTKYDPKFQVRVTITTDTSTSTAYLELSSLRSEDTAVYYCA |
| | | RSGGLPDVWGQGTTVTVSS |
| 119 | 159 VH, 218 VH | QVQLVQSGAEVKKPGASVKVSCKASGFDIQDTYMHWVKQRPGQGLEW |
| | | MGRIDPASGHTKYDPKFQVRVTITRDTSTSTAYMELSSLRSEDTAVYYC |
| | | ARSGGLPDVWGQGTTVTVSS |
| 120 | 103 VH, 45 VH, 167 | QVQLVQSGAEVKKPGASVKVSCKASGFDIQDTYMHWVKQRPGQGLEWI |
| | VH, 187 VH | GRIDPASGHTKYDPKFQVRVTITRDTSTSTAYLELSSLRSEDTAVYYCAR |
| | | SGGLPDVWGQGTTVTVSS |
| 121 | 64 VH, 148 VH, 97 | QVQLVQSGAEVKKPGASVKVSCKASGFDIQDTYMHWVRQAPGQGLEW |
| | VH, 114 VH, 130 VH, | MGRIEPASGHIKYDPKFQVRVTMTRDTSTSTVYMELSSLRSEDTAVYYC |
| | 133 VH, 137 VH, | ARSGGLPDWWGQGTTVTVSS |
| | 155 VH | |
| 122 | 67 VH, 138 VH, 115 | QVQLVQSGAEVKKPGASVKVSCKASGFDIQDTYMHWVRQAPGQGLEW |
| | VH, 149 VH, 134 VH, | MGRIEPASGHIKYDPKFQVRATMTRDTSTSTVYMELSSLRSEDTAVYYC |
| | 98 VH, 156 VH | ARSGGLPDWWGQGTTVTVSS |
| 123 | 68 VH, 99 VH, 116 | QVQLVQSGAEVKKPGASVKVSCKASGFDIQDTYMHWVRQAPGQGLEW |
| | VH | MGRIEPASGHIKYDPKFQVRVTITRDTSTSTVYMELSSLRSEDTAVYYCA |
| | | RSGGLPDWWGQGTTVTVSS |
| 124 | 94 VH, 113 VH, 151 | QVQLVQSGAEVKKPGASVKVSCKASGFDIQDTYMHWVRQAPGQGLEW |
| | VH, 78 VH | MGRIEPASGHIKYDPKFQVRATITRDTSTSTVYMELSSLRSEDTAVYYCA |
| | | RSGGLPDWWGQGTTVTVSS |
| 125 | 110 VH, 58 VH, 136 | QVQLVQSGAEVKKPGASVKVSCKASGFDIQDTYMHWVKQAPGQGLEW |
| | VH, 146 VH, 154 VH | MGRIEPASGHIKYDPKFQGRVTMTRDTSTSTVYMELSSLRSEDTAVYYC |
| | | ARSGGLPDWWGQGTTVTVSS |
| 126 | 169 VH, 175 VH | QVQLVQSGAEVKKPGASVKVSCKASGFDIQDTYMHWVKQAPGQGLEW |
| | | MGRIDPASGHIKYDPKFQGRVTMTRDTSTSTVYMELSSLRSEDTAVYYC |
| | | ARSGGLPDWWGQGTTVTVSS |
| 127 | 173 VH, 179 VH | QVQLVQSGAEVKKPGASVKVSCKASGFDIQDTYMHWVKQAPGQGLEW |
| | | MGRIEPASGHIKYDPKFQGRATMTRDTSTSTVYMELSSLRSEDTAVYYC |
| | | ARSGGLPDWWGQGTTVTVSS |
| 128 | 96 VH, 132 VH, 65 | QVQLVQSGAEVKKPGASVKVSCKASGFDIQDTYMHWVRQAPGQGLEW |
| | VH, 150 VH | MGRIEPASGHIKYDPKFQGRATMTRDTSTSTVYMELSSLRSEDTAVYYC |
| | | ARSGGLPDWWGQGTTVTVSS |
| 129 | 196 VH, 202 VH, | EVQLVQSGAEVKKPGASVKVSCKASGFDIQDTYMHWVRQAPGQGLEW |
| | 208 VH | MGRIEPASGHIKYDPKFQGRATMTRDTSTSTVYMELSSLRSEDTAVYYC |
| | | ARSGGLPDWWGQGTTVTVSS |
| 130 | 172 VH, 178 VH | QVQLVQSGAEVKKPGASVKVSCKASGFDIQDTYMHWVRQAPGQGLEW |
| | | MGRIDPASGHIKYDPKFQGRATMTRDTSTSTVYMELSSLRSEDTAVYYC |
| | | ARSGGLPDWWGQGTTVTVSS |
| 131 | 75 VH, 72 VH, 95 | QVQLVQSGAEVKKPGASVKVSCKASGFDIQDTYMHWVRQAPGQGLEW |
| | VH, 152 VH | MGRIEPASGHIKYDPKFQGRATITTDTSTSTVYMELSSLRSEDTAVYYCA |
| | | RSGGLPDWWGQGTTVTVSS |
| 132 | 174 VH, 180 VH | QVQLVQSGAEVKKPGASVKVSCKASGFDIQDTYMHWVRQAPGQGLEW |
| | | MGRIEPASGHIKYDPKFQGRATMTRDTSTSTAYMELSSLRSEDTAVYYC |
| | | ARSGGLPDWWGQGTTVTVSS |
| 133 | 109 VH, 91 VH, 135 | QVQLVQSGAEVKKPGASVKVSCKASGFDIQDTYMHWVRQAPGQGLEW |
| | VH, 145 VH, 153 VH | MGRIEPASGHIKYDPKFQGRVTMTRDTSTSTAYMELSSLRSEDTAVYYC |
| | | ARSGGLPDWWGQGTTVTVSS |
| 134 | 198 VH, 204 VH, | EVQLVQSGAEVKKPGASVKVSCKASGFDIQDTYMHWVRQAPGQGLEW |
| | 210 VH | MGRIEPASGHIKYDPKFQGRVTMTRDTSTSTAYMELSSLRSEDTAVYYC |
| | | ARSGGLPDWWGQGTTVTVSS |
| 135 | 170 VH, 176 VH | QVQLVQSGAEVKKPGASVKVSCKASGFDIQDTYMHWVRQAPGQGLEW |
| | | MGRIDPASGHIKYDPKFQGRVTMTRDTSTSTAYMELSSLRSEDTAVYYC |
| | | ARSGGLPDWWGQGTTVTVSS |
| 136 | 31 VH, 85 VH, 86 | QVQLVQSGAEVKKPGASVKVSCKASGFDIQDTYMHWVRQAPGQGLEW |
| | VH, 87 VH, 88 VH, | MGRIEPASGHIKYDPKFQGRVTMTRDTSTSTVYMELSSLRSEDTAVYYC |
| | 89 VH, 90 VH, 143 | ARSGGLPDWWGQGTTVTVSS |
| | VH, clone 34 VH | |
| 137 | 32 VH, 33 VH | DVQLVQSGAEVKKPGASVKVSCKASGFDIQDTYMHWVRQAPGQGLEW |
| | | MGRIEPASGHIKYDPKFQGRVTMTRDTSTSTVYMELSSLRSEDTAVYYC |
| | | ARSGGLPDWWGQGTTVTVSS |
| 138 | 35 VH, 182 VH | QVQLVQSGAEVKKPGASVKVSCKASGFDIQDTYMHWVKQAPGQGLEWI |
| | | GRIDPASGHTKYDPKFQVRATITTDTSTSTAYLELSSLRSEDTAVYYCAR |
| | | SGGLPDVWGQGTTVTVSS |
| 139 | 36 VH, 81 VH, 104 | QVQLVQSGAEVKKPGASVKVSCKASGFDIQDTYMHWVRQAPGQGLEWI |
| | VH, 165 VH, | GRIDPASGHTKYDPKFQVRATITTDTSTSTAYLELSSLRSEDTAVYYCAR |
| | | SGGLPDVWGQGTTVTVSS |
| 140 | 37 VH, 82 VH, 101 | QVQLVQSGAEVKKPGASVKVSCKASGFDIQDTYMHWVKQRPGQGLEW |
| | VH, 183 VH | MGRIDPASGHTKYDPKFQVRATITTDTSTSTAYLELSSLRSEDTAVYYCA |
| | | RSGGLPDVWGQGTTVTVSS |
| 141 | 38 VH, 190 VH | QVQLVQSGAEVKKPGASVKVSCKASGFDIQDTYMHWVKQRPGQGLEWI |
| | | GRIDPASGHTKYDPKFQVRATITTDTSTSTVYLELSSLRSEDTAVYYCAR |
| | | SGGLPDVWGQGTTVTVSS |
| 142 | 39 VH, 191 VH | QVQLVQSGAEVKKPGASVKVSCKASGFDIQDTYMHWVKQRPGQGLEWI |
| | | GRIDPASGHTKYDPKFQVRATITTDTSTSTAYMELSSLRSEDTAVYYCAR |
| | | SGGLPDVWGQGTTVTVSS |
| 143 | 40 VH, 105 VH, 192 | QVQLVQSGAEVKKPGASVKVSCKASGFDIQDTYMHWVKQRPGQGLEWI |
| | VH | GRIDPASGHTKYDPKFQVRATITTDTSTSTVYMELSSLRSEDTAVYYCAR |
| | | SGGLPDVWGQGTTVTVSS |
| 144 | 42 VH, 83 VH, 186 | QVQLVQSGAEVKKPGASVKVSCKASGFDIQDTYMHWVKQRPGQGLEWI |
| | VH | GRIDPASGHTKYDPKFQVRATMTTDTSTSTAYLELSSLRSEDTAVYYCA |
| | | RSGGLPDVWGQGTTVTVSS |
| 145 | 43 VH, 184 VH | QVQLVQSGAEVKKPGASVKVSCKASGFDIQDTYMHWVKQRPGQGLEWI |
| | | GRIDPASGHTKYDPKFQVRATITRDTSTSTAYLELSSLRSEDTAVYYCAR |
| | | SGGLPDVWGQGTTVTVSS |
| 146 | 44 VH, 53 VH, 166 | QVQLVQSGAEVKKPGASVKVSCKASGFDIQDTYMHWVKQRPGQGLEWI |
| | VH, 189 VH | GRIDPASGHTKYDPKFQVRVTMTTDTSTSTAYLELSSLRSEDTAVYYCA |
| | | RSGGLPDVWGQGTTVTVSS |
| 147 | 46 VH, 168 VH, 185 | QVQLVQSGAEVKKPGASVKVSCKASGFDIQDTYMHWVKQRPGQGLEWI |
| | VH | GRIDPASGHTKYDPKFQVRATMTRDTSTSTAYLELSSLRSEDTAVYYCA |
| | | RSGGLPDVWGQGTTVTVSS |
| 148 | 47 VH | QVQLVQSGAEVKKPGASVKVSCKASGFDIQDTYMHWVKQRPGQGLEWI |
| | | GRIDPASGHTKYDPKFQVRVTMTRDTSTSTAYLELSSLRSEDTAVYYCA |
| | | RSGGLPDVWGQGTTVTVSS |
| 149 | 54 VH | DVQLVQSGAEVKKPGASVKVSCKASGFDIQDTYMHWVKQRPGQGLEWI |
| | | GRIDPASGHTKYDPKFQVRATITTDTSTSTAYLELSSLRSEDTAVYYCAR |
| | | SGGLPDVWGQGTTVTVSS |
| 150 | 57 VH, 111 VH | QVQLVQSGAEVKKPGASVKVSCKASGFDIQDTYMHWVRQRPGQGLEW |
| | | MGRIEPASGHIKYDPKFQGRVTMTRDTSTSTVYMELSSLRSEDTAVYYC |
| | | ARSGGLPDWWGQGTTVTVSS |
| 151 | 60 VH, 117 VH | QVQLVQSGAEVKKPGASVKVSCKASGFDIQDTYMHWVRQAPGQGLEW |
| | | MGRIDPASGHIKYDPKFQGRVTMTRDTSTSTVYMELSSLRSEDTAVYYC |
| | | ARSGGLPDWWGQGTTVTVSS |
| 152 | 61 VH | QVQLVQSGAEVKKPGASVKVSCKASGFDIQDTYMHWVRQAPGQGLEWI |
| | | GRIEPASGHIKYDPKFQGRVTMTRDTSTSTVYMELSSLRSEDTAVYYCAR |
| | | SGGLPDWWGQGTTVTVSS |
| 153 | 62 VH, 118 VH | QVQLVQSGAEVKKPGASVKVSCKASGFDIQDTYMHWVRQAPGQGLEWI |
| | | GRIDPASGHIKYDPKFQGRVTMTRDTSTSTVYMELSSLRSEDTAVYYCA |
| | | RSGGLPDWWGQGTTVTVSS |
| 154 | 63 VH, 120 VH | QVQLVQSGAEVKKPGASVKVSCKASGFDIQDTYMHWVRQAPGQGLEW |
| | | MGRIEPASGHVKYDPKFQGRVTMTRDTSTSTVYMELSSLRSEDTAVYYC |
| | | ARSGGLPDWWGQGTTVTVSS |
| 155 | 66 VH | QVQLVQSGAEVKKPGASVKVSCKASGFDIQDTYMHWVRQAPGQGLEW |
| | | MGRIEPASGHIKYDPKFQGRVTITRDTSTSTVYMELSSLRSEDTAVYYCA |
| | | RSGGLPDWWGQGTTVTVSS |
| 156 | 69 VH, 108 VH | EVQLVQSGAEVKKPGASVKVSCKASGFDIQDTYMHWVRQAPGQGLEW |
| | | MGRIEPASGHIKYDPKFQGRVTMTRDTSTSTVYMELSSLRSEDTAVYYC |
| | | ARSGGLPDWWGQGTTVTVSS |
| 157 | 70 VH, 73 VH | QVQLVQSGAEVKKPGASVKVSCKASGFDIQDTYMHWVRQAPGQGLEW |
| | | MGRIEPASGHIKYDPKFQGRVTMTTDTSTSTVYMELSSLRSEDTAVYYC |
| | | ARSGGLPDWWGQGTTVTVSS |
| 158 | 71 VH, 74 VH | QVQLVQSGAEVKKPGASVKVSCKASGFDIQDTYMHWVRQAPGQGLEW |
| | | MGRIEPASGHIKYDPKFQGRVTITTDTSTSTVYMELSSLRSEDTAVYYCA |
| | | RSGGLPDWWGQGTTVTVSS |
| 159 | 76 VH, 119 VH | QVQLVQSGAEVKKPGASVKVSCKASGFDIQDTYMHWVRQAPGQGLEW |
| | | MGRIEPASGHTKYDPKFQGRVTMTRDTSTSTVYMELSSLRSEDTAVYYC |
| | | ARSGGLPDWWGQGTTVTVSS |
| 160 | 77 VH | QVQLVQSGAEVKKPGASVKVSCKASGFDIQDTYMHWVRQAPGQGLEW |
| | | MGRIEPASGHIKYDPKFQGRATITRDTSTSTVYMELSSLRSEDTAVYYCA |
| | | RSGGLPDWWGQGTTVTVSS |
| 161 | 92 VH | QVQLVQSGAEVKKPGASVKVSCKASGFDIQDTYMHWVRQAPGQGLEW |
| | | MGRIEPASGHIKYDPKFQGRVTMTRDTSTSTVYLELSSLRSEDTAVYYCA |
| | | RSGGLPDWWGQGTTVTVSS |
| 162 | 93 VH | QVQLVQSGAEVKKPGASVKVSCKASGFDIQDTYMHWVRQAPGQGLEW |
| | | MGRIEPASGHIKYDPKFQGRVTMTRDTSTSTAYLELSSLRSEDTAVYYCA |
| | | RSGGLPDWWGQGTTVTVSS |
| 163 | 121 VH | QVQLVQSGAEVKKPGASVKVSCKASGFDIQDTYMHWVRQRPGQGLEW |
| | | MGRIDPASGHTKYDPKFQVRATITTDTSTSTAYLELSSLRSEDTAVYYCA |
| | | RSGGLPDVWGQGTTVTVSS |
| 164 | 124 VH | QVQLVQSGAEVKKPGASVKVSCKASGFDIQDTYMHWVRQRPGQGLEWI |
| | | GRIDPASGHTKYDPKFQVRVTITTDTSTSTAYLELSSLRSEDTAVYYCAR |
| | | SGGLPDVWGQGTTVTVSS |
| 165 | 161 VH | QVQLVQSGAEVKKPGASVKVSCKASGFDIQDTYMHWVRQRPGQGLEW |
| | | MGRIDPASGHTKYDPKFQVRVTITTDTSTSTVYLELSSLRSEDTAVYYCA |
| | | RSGGLPDVWGQGTTVTVSS |
| 166 | 163 VH | QVQLVQSGAEVKKPGASVKVSCKASGFDIQDTYMHWVRQRPGQGLEW |
| | | MGRIDPASGHTKYDPKFQVRVTITTDTSTSTAYMELSSLRSEDTAVYYCA |
| | | RSGGLPDVWGQGTTVTVSS |
| 167 | 164 VH | QVQLVQSGAEVKKPGASVKVSCKASGFDIQDTYMHWVRQRPGQGLEW |
| | | MGRIDPASGHTKYDPKFQVRVTMTTDTSTSTAYLELSSLRSEDTAVYYC |
| | | ARSGGLPDVWGQGTTVTVSS |
| 168 | 171 VH, 177 VH | QVQLVQSGAEVKKPGASVKVSCKASGFDIQDTYMHWVRQAPGQGLEW |
| | | MGRIDPASGHIKYDPKFQGRATITTDTSTSTVYMELSSLRSEDTAVYYCA |
| | | RSGGLPDWWGQGTTVTVSS |
| 169 | 195 VH, 201 VH, | EVQLVQSGAEVKKPGASVKVSCKASGFDIQDTYMHWVRQAPGQGLEW |
| | 207 VH | MGRIEPASGHIKYDPKFQGRATITTDTSTSTVYMELSSLRSEDTAVYYCA |
| | | RSGGLPDWWGQGTTVTVSS |
| 1200 | 5C3D11 VH | EVQLQQSGAELVKPGASVKLSCTASGFDIQDTYMHWVKQRPEQGLEWI |
| | | GRIDPASGHTKYDPKFQVKATITTDTSSNTAYLQLSSLTSEDTAVYYCSR |
| | | SGGLPDVWGAGTTVTVSS |
| 1201 | 9E12E5 VH | QVHLQQSGPELVKPGASVKLSCKASGYTFTKYDINWVRQRPEQGLEWIG |
| | | WIFPGDGRTDYNEKFKGKATLTTDKSSSTAYMEVSRLTSEDSAVYFCAR |
| | | YGPAMDYWGQGTSVTVAS |
| 1202 | AS12824 VH | QVQLVQSGAEVKKPGASVKVSCKASGFDICDTYMHWVKQRPGQGLEWI |
| | | GRIDPASGHTKYDPKFQVRATITTDTSTSTAYLELSSLRSEDTAVYYCAR |
| | | SGGLPDVWGQGTTVTVSS |
| 1203 | AS12823 VH | QVQLVQSGAEVKKPGASVKLSCKASGFDICDTYMHWVRQRPGQGLEWI |
| | | GRIDPASGHTKYDPKFQVRATMTTDTSTSTVYLELSSLRSEDTAVYYCA |
| | | RSGGLPDVWGQGTTVTVSS |
| 1204 | AS12819 VH | QVQLVQSGAEVVKPGASVKLSCKASGFDICDTYMHWVRQRPGQGLEW |
| | | MGRIDPASGHTKYDPKFQVRVTMTTDTSTSTVYLELSSLRSEDTAVYYC |
| | | ARSGGLPDVWGQGTTVTVSS |
| 1205 | AS12816 VH | QVQLVQSGAEVKKPGASVKVSCKASGFDICDTYMHWVKQRPGQGLEWI |
| | | GRIDPASGHTKYDPKFQVRATITRDTSTSTAYLELSSLRSEDTAVYYCSRS |
| | | GGLPDVWGQGTTVTVSS |
| 1206 | AS12825 VH | QVQLVQSGAEVKKPGASVKVSCKASGFDICDTYMHWVKQAPGQGLEW |
| | | MGRIDPASGHTKYDPKFQVRATMTTDTSTSTAYLELSSLRSEDTAVYYC |
| | | SRSGGLPDVWGQGTTVTVSS |
| 1207 | 12835 VH | QVQLVQSGAEVKKPGASVKLSCKASGFDIQDTYMHWVRQAPGQGLEW |
| | | MGRIDPASGHTKYDPKFQVRVTMTTDTSTSTVYMELSSLRSEDTAVYYC |
| | | SRSGGLPDVWGQGTTVTVSS |
| 1208 | 18-7 VH | QVQLVQSGAEVKKPGASVKLSCKASGFDIQDTYMHWVRQAPGQGLEW |
| | | MGRIDPASGHTKYDPKFQVRVTMTRDTSTSTVYMELSSLRSEDTAVYYC |
| | | SRSGGLPDVWGQGTTVTVSS |
| 1209 | 21-3 VH, L8 VH | QVQLVQSGAEVKKPGASVKVSCKASGFDIQDTYMHWVRQAPGQGLEW |
| | | MGRIDPASGHTKYDPKFQVRVTMTRDTSTSTVYMELSSLRSEDTAVYYC |
| | | ARSGGLPDVWGQGTTVTVSS |
| 1210 | 21-3 V102K VH | QVQLVQSGAEVKKPGASVKVSCKASGFDIQDTYMHWVRQAPGQGLEW |
| | | MGRIDPASGHTKYDPKFQVRVTMTRDTSTSTVYMELSSLRSEDTAVYYC |
| | | ARSGGLPDKWGQGTTVTVSS |
| 1211 | 21-3 V102M VH | QVQLVQSGAEVKKPGASVKVSCKASGFDIQDTYMHWVRQAPGQGLEW |
| | | MGRIDPASGHTKYDPKFQVRVTMTRDTSTSTVYMELSSLRSEDTAVYYC |
| | | ARSGGLPDMWGQGTTVTVSS |
| 1212 | 21-3 V102Q VH | QVQLVQSGAEVKKPGASVKVSCKASGFDIQDTYMHWVRQAPGQGLEW |
| | | MGRIDPASGHTKYDPKFQVRVTMTRDTSTSTVYMELSSLRSEDTAVYYC |
| | | ARSGGLPDQWGQGTTVTVSS |
| 1213 | 21-3 V102W VH | QVQLVQSGAEVKKPGASVKVSCKASGFDIQDTYMHWVRQAPGQGLEW |
| | | MGRIDPASGHTKYDPKFQVRVTMTRDTSTSTVYMELSSLRSEDTAVYYC |
| | | ARSGGLPDWWGQGTTVTVSS |
| 1214 | 21-3 CDRv VH | QVQLVQSGAEVKKPGASVKVSCKASGFX₁X₂X₃DTX₄X₅HWVRQAPGQGL |
| | | EWMGRIDPASGHTKYDPKFQVRVTMTRDTSTSTVYMELSSLRSEDTAV |
| | | YYCARSGGX₆PDX₇WGQGTTVTVSS |
| | | X₁ = D or E |
| | | X₂ = I, P, or V |
| | | X₃ = G, Q, S, or V |
| | | X₄ = F or Y |
| | | X₅ = I or M |
| | | X₆ = L or M |
| | | X₇ = E, I, K, L, M, Q T, V, W, or Y |
| 1215 | 21-3 CDRv VH | QVQLVQSGAEVKKPGASVKVSCKASGFX₁X₂X₃DTX₄X₅HWVRQAPGQGL |
| | | EWMGRIDPASGHTKYDPKFQVRVTMTRDTSTSTVYMELSSLRSEDTAV |
| | | YYCSRSGGX₆PDX₇WGQGTTVTVSS |
| | | X₁ = D or E |
| | | X₂ = I, P, or V |
| | | X₃ = G, Q, S, or V |
| | | X₄ = F or Y |
| | | X₅ = I or M |
| | | X₆ = L or M |
| | | X₇ = E, I, K, L, M, Q, T, V, W, or Y |
| 1216 | Clone 2 VH, clone 52 | QVQLVQSGAEVKKPGASVKVSCKASGFDIQDTYMEIWVRQAPG |
| | VH | QGLEWMGRIEPASGHIKYSPKFQGRVTMTRDTSTSTVYMELSSL |
| | | RSEDTAVYYCARSGGLPDWWGQGTTVTVSS |
| 1217 | Clone 46 VH | QVQLVQSGAEVKKPGASVKVSCKASGFDIQDTYMEIWVRQAPG |
| | | QGLEWMGRIEPASGHVKYSPKFQVRVTMTRDTSTSTVYMELSSL |
| | | RSEDTAVYYCARSGGLPDWWGQGTTVTVSS |
| 1218 | Clone 47 VH | QVQLVQSGAEVKKPGASVKVSCKASGFDIQDTYMEIWVRQAPG |
| | | QGLEWMGRIEPASGHVKYDPKFQTRVTMTRDTSTSTVYMELSSL |
| | | RSEDTAVYYCARSGGLPDWWGQGTTVTVSS |
| 1219 | Clone 14 VH | QVQLVQSGAEVKKPGASVKVSCKASGFDIQDTYMEIWVRQAPG |
| | | QGLEWMGRIDPASGHiKYDPKFQkRVTMTRDTSTSTVYMELSSL |
| | | RSEDTAVYYCARSGGLPDMWGQGTTVTVSS |
| 1220 | Clone 16L VH | QVQLVQSGAEVKKPGASVKVSCKASGFDIQDTYMEIWVRQAPG |
| | | QGLEWMGRIDPASGHvKiDPKFQVRVTMTRDTSTSTVYMELSSL |
| | | RSEDTAVYYCARSGGLPDMWGQGTTVTVSS |
| 1221 | Clone 17L VH | QVQLVQSGAEVKKPGASVKVSCKASGFDIQDTYMEIWVRQAPG |
| | | QGLEWMGRIDPASGHLKYDPKFQVRVTMTRDTSTSTVYMELSS |
| | | LRSEDTAVYYCARSGGLPDMWGQGTTVTVSS |
| 1222 | Clone 17L-1 VH | QVQLVQSGAEVKKPGASVKVSCKASGFDIQDTYMEIWVRQAPG |
| | | QGLEWMGRIDPASGHLKYDPKFQRRVTMTRDTSTSTVYMELSSL |
| | | RSEDTAVYYCARSGGLPDMWGQGTTVTVSS |
| 1223 | Clone 23 VH, clone | QVQLVQSGAEVKKPGASVKVSCKASGFDIQDTYMEIWVRQAPG |
| | A1 VH | QGLEWMGRIDPASGHLKYDPKFQNRVTMTRDTSTSTVYMELSS |
| | | LRSEDTAVYYCARSGGLPDKWGQGTTVTVSS |
| 1224 | Clone 53 VH, clone | QVQLVQSGAEVKKPGASVKVSCKASGFDIQDTYMEIWVRQAPG |
| | E1 VH | QGLEWMGRIEPASGHLKYDPKFQERVTMTRDTSTSTVYMELSSL |
| | | RSEDTAVYYCARSGGLPDKWGQGTTVTVSS |
| 1225 | Clone 3-17L V-A VH | QVQLVQSGAEVKKPGASVKVSCKASGFDIQDTYMEIWVRQAPG |
| | | QGLEWMGRIDPASGHLKYDPKFQGRVTITRDTSASTAYMELSSL |
| | | RSEDTAVYYCARSGGLPDMWGQGTTVTVSS |
| 1226 | Clone 3-17L VH | QVQLVQSGAEVKKPGASVKVSCKASGFDIQDTYMEIWVRQAPG |
| | | QGLEWMGRIDPASGHLKYDPKFQGRVTITRDTSASTVYMELSSL |
| | | RSEDTAVYYCARSGGLPDMWGQGTTVTVSS |
| 1227 | Clone L8mod VH | QVQLVQSGAEVKKPGASVKVSCKASGFDIQDTYMEIWVRQAPG |
| | | QGLEWMGRIDPASGHTKYDPKFQGRATITTDTSASTAYLQLSSL |
| | | RSEDTAVYYCARSGGLPDVWGQGTTVTVSS |
| 1228 | Clone X-V VH | QVQLVQSGAEVKKPGASVKVSCKASGFDIQDTYMEIWVRQAPG |
| | | QGLEWMGRIDPASGHTKYDPKFQVRATITTDTSASTAYLQLSSL |
| | | RSEDTAVYYCARSGGLPDFWGQGTTVTVSS |
| 1229 | Clone X VH, clone | QVQLVQSGAEVKKPGASVKVSCKASGFDIQDTYMEIWVRQAPG |
| | XL3-6 VH, clone | QGLEWMGRIDPASGHTKYDPKFQGRATITTDTSASTAYLQLSSL |
| | XL3-10 VH, clone | RSEDTAVYYCARSGGLPDFWGQGTTVTVSS |
| | XL3-15 VH, clone | |
| | L3-13 VH | |
| 1230 | Clone H3-1 VH | QVQLVQSGAEVKKPGASVKVSCKASGFDIQDTYMEIWVRQAPG |
| | | QGLEWMGRIDPASGHTKYDPKFQGRATITTDTSASTAYLQLSSL |
| | | RSEDTAVYYCARSGGLPDLWGQGTTVTVSS |
| 1231 | Clone H2-2 VH | QVQLVQSGAEVKKPGASVKVSCKASGFDIQDTYMEIWVRQAPG |
| | | QGLEWMGRIDPASGHSKYDPKFQVRATITTDTSASTAYLQLSSLR |
| | | SEDTAVYYCARSGGLPDFWGQGTTVTVSS |
| 1232 | Clone H2-5 VH | QVQLVQSGAEVKKPGASVKVSCKASGFDIQDTYMEIWVRQAPG |
| | | QGLEWMGRIDPASGHYKYDPKFQVRATITTDTSASTAYLQLSSL |
| | | RSEDTAVYYCARSGGLPDFWGQGTTVTVSS |
| 1233 | M1 VH | EVQLVESGGGLVQPGGSLRLSCAVSGFTFSSYWMSWVRQAPGKGLEWV |
| | | ANIKEDGSEKNYVDSVKGRFTLSSDNAKNSLYLQMNSLRAEDTAVYYCA |
| | | REDYDSYYKYGMDVWGQGTAVIVSS |
| 1234 | M2 VH | QVQLQQWGAGLLKPSETLSLTCAVYGGSFTGFYWSWIRQPPGKGLEWI |
| | | GEINHRGNTNYNPSLKSRVTMSVDTSKNQFSLNMISVTAADTAMYFCAS |
| | | PFYDFWSGSDYWGQGTLVTVSS |
| 1235 | M3 VH | QVQLVQSGAEVKKPGASVKVSCKASGYDFTYYGISWVRQAPGQGLEWM |
| | | GWISTYNGNTHYARMLQGRVTMTTDTSTRTAYMELRSLRSDDTAVYYC |
| | | ARENYYGSGAYRGGMDVWGQGTTVTVSS |
| 1236 | M3 VH + constant | QVQLVQSGAEVKKPGASVKVSCKASGYDFTYYGISWVRQAPGQGLEWM |
| | | GWISTYNGNTHYARMLQGRVTMTTDTSTRTAYMELRSLRSDDTAVYYC |
| | | ARENYYGSGAYRGGMDVWGQGTTVTVSSASTKGPSVFPLAPSSKSTSGG |
| | | TAALGCLVKDYFPEPVTVSWNSGALTSGVHTFPAVLQSSGLYSLSSVVTV |
| | | PSSSLGTQTYICNVNHKPSNTKVDKKVEPKSCDKTHTCPPCPAPEAAGA |
| | | PSVFLFPPKPKDTLMISRTPEVTCVVVDVSHEDPEVKFNWYVDGVEVH |
| | | NAKTKPREEQYNSTYRVVSVLTVLHQDWLNGKEYKCKVSNKALPAPIE |
| | | KTISKAKGQPREPQVYTLPPSREEMTKNQVSLTCLVKGFYPSDIAVEWE |
| | | SNGQPENNYKTTPPVLDSDGSFFLYSKLTVDKSRWQQGNVFSCSVMHE |
| | | ALHNHYTQKSLSLSPG |
| 1237 | M4 VH | QLQLQESGPGLVKPSETLSLTCTVSGGSISSRSYYWGWIRQPPGKGLEWI |
| | | GSIYYNGRTYYNPSLKSRVTISVDTSKNQFSLKLSSVTAADTAVYYCARE |
| | | DYGDYGAFDIWGQGTMVTVSS |
| 1238 | M5 VH | QVTLKESGPALVKPTQTLTLTCTFSGFSLSTSNMGVVWIRQPPGKALEW |
| | | LAHILWDDREYSNPALKSRLTISKDTSKNQVVLTMTNMDPVDTATYYC |
| | | ARMSRNYYGSSYVMDYWGQGTLVTVSS |
| 1239 | M6 VH | QVQLVQSGSELKKPGASVKVSCKASGYTFTLYGMNWVRQAPGQGLEW |
| | | MGWINTYTGEPTYADDFKGRFVFSLDTSVSTAYLQISSLKAEDTAVYYC |
| | | ARDTAMDYAMAYWGQGTLVTVSS |
| 1240 | M6 VH | QVQLVQSGSELKKPGASVKVSCKASGYTFTLYGMNWVKQAPGKGLKW |
| | | MGWINTYTGEPTYADDFKGRFVFSLDTSVSTAYLQISSLKAEDTAVYFCA |
| | | RDTAMDYAMAYWGQGTLVTVSS |
| 1241 | M6 VH | QVQLVQSGSELKKPGASVKVSCKASGYTFTNYGMNWVRQAPGQGLEW |
| | | MGWINTYTGEPTYADDFKGRFVFSLDTSVSTAYLQISSLKAEDTAVYYC |
| | | ARDYGKYGDYYAMDYWGQGTLVTVSS |
| 1242 | M6 VH | QVQLVQSGSELKKPGASVKVSCKASGYTFTNYGMNWVRQAPGKGLKW |
| | | MGWINTYTGEPTYADDFKGRFVFSLDTSVSTAYLQISSLKAEDTAVYFCA |
| | | RDYGKYGDYYAMDYWGQGTLVTVSS |
| 1243 | M7 VH | QVQLQQPGSVLVRPGASVKVSCKASGYTFTSSWMHWAKQRPGQGLEWI |
| | | GEIHPNSGGTNYNEKFKGKATVDTSSSTAYVDLSSLTSEDSAVYYCARGD |
| | | YYGYVSWFAYWGQGTLVTVSS |
| 1244 | M7 VH | QVQLVQSGAEVKKPGASVKVSCKASGYTFTSSWMHWARQAPGQGLEW |
| | | IGEIHPNSGGTNYAQKFQGRATLTVDTSSSTAYMELSRLRSDDTAVYYCA |
| | | RGDYYGYVSWFAYWGQGTLVTVSS |
| 1245 | M7 VH | QVQLVQSGAEVKKPGASVKVSCKASGYTFTSSWMHWARQAPGQGLEW |
| | | IGEIHPNSGGTNYAQKFQGRATMTVDTSISTAYMELSRLRSDDTAVYYC |
| | | ARGDYYGYVSWFAYWGQGTLVTVSS |
| 1246 | M7 VH | QVQLVQSGAEVKKPGASVKVSCKASGYTFTSSWMHWARQAPGQGLEW |
| | | IGEIHPNSGGTNYAQKFQGRVTMTVDTSISTAYMELSRLRSDDTAVYYC |
| | | ARGDYYGYVSWFAYWGQGTLVTVSS |
| 1247 | M7 VH | QVQLVQSGAEVKKPGASVKVSCKASGYTFTSSWMHWARQAPGQGLEW |
| | | MGEIHPNSGGTNYAQKFQGRVTMTVDTSISTAYMELSRLRSDDTAVYYC |
| | | ARGDYYGYVSWFAYWGQGTLVTVSS |
| 1248 | M8 VH | QVQLVQSGAEVKKPGASVKVSCKASGYTFTSYDINWVRQAPGQGLEWM |
| | | GWLNPNSGNTGYAQKFQGRVTMTADRSTSTAYMELSSLRSEDTAVYYC |
| | | AREVPETAAFEYWGQGTLVTVSS |
| 1249 | M8 VH | QVQLVQSGAEVKKPGASVKVSCKASGYTFTSYDINWVRQAPGQGLEWM |
| | | GWLNPNSGNTGYAQKFQGRVTMTADRSTSTAYMELSSLRSEDTAVYYC |
| | | AREVPETAAFEYWGQGTLVTVSS |
| 1250 | M8 VH | QVQLVQSGAEVKKPGASVKVSCKASGYTFTSYDINWVRQAPGQGLEWM |
| | | GWLNPNSGYTGYAQKFQGRVTMTADRSTSTAYMELSSLRSEDTAVYYC |
| | | AREVPETAAFEYWGQGTLVTVSS |
| 1251 | M8 VH | QVQLVQSGAEVKKPGASVKVSCKASGYTFTSYDINWVRQAPGQGLEWM |
| | | GWLNPNSGNTGYAQKFQGRVTMTADRSTSTAYMELSSLRSEDTAVYYC |
| | | AREVPETAAFEYWGQGTLVTVSS |
| 1252 | M8 VH | QVQLVQSGAEVKKPGASVKVSCKASGYTFTSYDINWVRQAPGQGLEWM |
| | | GWLNPNSGNTGYAQKFQGRVTMTADRSTSTAYMELSSLRSEDTAVYYC |
| | | AREVPETAAFEYWGQGTLVTVSS |
| 1253 | M8 VH | QVQLVQSGAEVKKPGASVKVSCKASGYTFTSYDINWVRQAPGQGLEWM |
| | | GWLNPNSGNTGYAQKFQGRVTMTADRSTSTAYMELSSLRSEDTAVYYC |
| | | AREVPETAAFEYWGQGTLVTVSS |
| 1254 | M8 VH | QVQLVQSGAEVKKPGASVKVSCKASGYTFTSYDINWVRQAPGQGLEWM |
| | | GWLNPNSGNTGYAQKFQGRVTMTADRSTSTAYMELSSLRSEDTAVYYC |
| | | AREVPETAAFEYWGQGTLVTVSS |
| 1255 | M8 VH | QVQLVQSGAEVKKPGASVKVSCKASGYTFTSYDINWVRQAPGQGLEWM |
| | | GWLNPNSGYTGYAQKFQGRVTMTADRSTSTAYMELSSLRSEDTAVYYC |
| | | AREVPETAAFEYWGQGTLVTVSS |
| 1256 | M8 VH | QVQLVQSGAEVKKPGASVKVSCKASGYTFTSYDINWVRQAPGQGLEWM |
| | | GWLNPNSGYTGYAQKFQGRVTMTADRSTSTAYMELSSLRSEDTAVYYC |
| | | AREVPETAAFEYWGQGTLVTVSS |
| 1257 | M8 VH | QVQLVQSGAEVKKPGASVKVSCKASGYTFTSYDINWVRQAPGQGLEWM |
| | | GWLNPNSGYTGYAQKFQGRVTMTADRSTSTAYMELSSLRSEDTAVYYC |
| | | AREVPETAAFEYWGQGTLVTVSS |
| 1258 | M8 VH | QVQLVQSGAEVKKPGASVKVSCKASGYTFTSYDINWVRQAPGQGLEWM |
| | | GWLNPNSGYTGYAQKFQGRVTMTADRSTSTAYMELSSLRSEDTAVYYC |
| | | AREVPETAAFEYWGQGTLVTVSS |
| 1259 | M8 VH | QVQLVQSGAEVKKPGASVKVSCKASGYTFTSYDINWVRQAPGQGLEWM |
| | | GWLNPNSGYTGYAQKFQGRVTMTADRSTSTAYMELSSLRSEDTAVYYC |
| | | AREVPETAAFEYWGQGTLVTVSS |
| 1260 | M9 VH | QVQLQESGPGLVKPSETLSLTCTVSGGSISSYFWSWIRQPPGKGLEWIGYI |
| | | YYSGNTKYNPSLKSRVTISIDTSKNQFSLKLSSVTAADTAVYYCARETGSY |
| | | YGFDYWGQGTLVTVSS |
| 1261 | M10 VH | QVQLQQWGAGLLKPSETLSLTCAVHGGSFSGYYWNWIRQPPGKGLEWI |
| | | GEINHAGNTNYNPSLKSRVTISLDTSKNQFSLTLTSVTAADTAVYYCARG |
| | | YCRSTTCYFDYWGQGTLVTVSS |
| 1262 | M11 VH | EVQLLESGGGLVQPGKSLRLSCAVSGFTESTYGMNWVRQAPGK |
| | | GLEWVSSISGTGRTTYHADSVQGRFTVSRDNSKNILYLQMNSLR |
| | | ADDTAVYFCTKERGDYYYGVFDYWGQGTLVTVSS |
| 1263 | M12 VH | QIQLVQSGPELKKPGETVKISCKASGYTFTTYGMSWVKQAPGKG |
| | | LKWMGWMNTYSGVTTYADDFKGRFAFSLETSASTAYMQIDNL |
| | | KNEDTATYFCAREGYVFDDYYATDYWGQGTSVTVSS |
| 301 | Variable Heavy 1 | X1VQLVQSGAEVKKPGASVKVSCKAS[HCDR1]WVX2QX3PGQG |
| | | LEWX4G[HCDR2]RX5TX6TX7DTSTSTX8YX9ELSSLRSEDTAVY |
| | | YCAR[HCDR3]WGQGTTVTVSS |
| | | wherein each of X1-X11 is independently selected |
| | | from A, R, N, D, C, Q, E, G, H, I, L, K, M, F, P, |
| | | S, T, W, Y, or V |
| | | In some cases, X1 = Q or E |
| | | In some cases, X2 = R or K |
| | | In some cases, X3 = A or R |
| | | In some cases, X4 = M or I |
| | | In some cases, XS = V or A |
| | | In some cases, X6 = M or I |
| | | In some cases, X7 = R or T |
| | | In some cases, X8 = V or A |
| | | In some cases, X9 = M or L |
| 302 | Variable Heavy 2 | X1VQLVQSGAEVKKPGASVKVSCKAS[HCDR1]WVX2QX3PGQG |
| | | LEWX4G[HCDR2]RX5TX6TX7DTSTSTX8YX9ELSSLRSEDTAVY |
| | | YC[HCDR3]WGQGTTVTVSS |
| | | wherein each of X1-X11 is independently selected |
| | | from A, R, N, D, C, Q, E, G, H, I, L, K, M, F, P, |
| | | S, T, W, Y, or V |
| | | In some cases, X1 = Q or E |
| | | In some cases, X2 = R or K |
| | | In some cases, X3 = A or R |
| | | In some cases, X4 = M or I |
| | | In some cases, X5 = V or A |
| | | In some cases, X6 = M or I |
| | | In some cases, X7 = R or T |
| | | In some cases, X8 = V or A |
| | | In some cases, X9 = M or L |
| 1301 | Variable Heavy 3 | X1VQLVQSGAEVKKPGASVKVSCKAS[HCDR1]WVX2QRPGQGLEWX4G |
| | | [HCDR2]RX5TX6TX7DTSTSTX8YX9ELSSLRSEDTAVYYCAR[HCDR3] |
| | | WGQGTTVTVSS |
| | | wherein each of X1, X2, X4, XS, X6, X7, X8, X9, X10, |
| | | and X11 is independently selected from A, R, N, D, C, |
| | | Q, E, G, H, I, L, K, M, F, P, S, T, W, Y, or V |
| | | In some cases, X1 = Q or E |
| | | In some cases, X2 = R or K |
| | | In some cases, X4 = M or I |
| | | In some cases, X5 = V or A |
| | | In some cases, X6 = M or I |
| | | In some cases, X7 = R or T |
| | | In some cases, X8 = V or A |
| | | In some cases, X9 = M or L |
| 1302 | Variable Heavy 4 | X1VQLVQSGAEVKKPGASVKVSCKAS[HCDR1]WVX2QRPGQGLEWX4G |
| | | [HCDR2]RX5TX6TX7DTSTSTX8YX9ELSSLRSEDTAVYYC[HCDR3]WG |
| | | QGTTVTVSS |
| | | wherein each of X1, X2, X4, XS, X6, X7, X8, X9, X10, |
| | | and X11 is independently selected from A, R, N, D, C, |
| | | Q, E, G, H, I, L, K, M, F, P, S, T, W, Y, or V |
| | | In some cases, X1 = Q or E |
| | | In some cases, X2 = R or K |
| | | In some cases, X4 = M or I |
| | | In some cases, X5 = V or A |
| | | In some cases, X6 = M or I |
| | | In some cases, X7 = R or T |
| | | In some cases, X8 = V or A |
| | | In some cases, X9 = M or L |

TABLE 2E
Light chain variable region (VL) amino acid sequences

| SEQ | | |
|---|---|---|
| ID NO | Description | Sequence |
| 201 | 217 VL, | EIVLTQSPGTLSLSPGERATLSCRASSSVSYMYWYQQKPGQAPRPLIYA |
| | 219 VL, 221 VL, | TSNLASGIPDRFSGSGSGTDFTLTISRLEPEDFAVYYCQQWEGNPRTFG |
| | 200 VL, 213 VL, | GGTKLEIK |
| | 212 VL, 211 VL, | |
| | 199 VL, 214 VL, | |
| | 216 VL, 222 VL, | |
| | 203 VL, 147 VL, | |
| | 218 VL, 179 VL, | |
| | 148 VL, 149 VL, | |
| | 151 VL, 180 VL, 175 | |
| | VL, 178 VL, 145 VL, | |
| | 146 VL, 150 VL, 152 | |
| | VL, 176 VL, 177 VL, | |
| | 201 VL, 202 VL, 204 | |
| | VL, 215 VL, 224 VL | |
| 202 | 223 VL, 107 VL, | EIVLTQSPGTLSLSPGERATLSCRASSSVSYMYWYQQKPGQAPRLLIYA |
| | 205 VL, 181 VL, | TSNLASGIPDRFSGSGSGTDFTLTISRLEPEDFAVYYCQQWEGNPRTFG |
| | 188 VL, 64 VL, | GGTKLEIK |
| | 67 VL, 68 VL, | |
| | 94 VL, 33 VL, 57 | |
| | VL, 58 VL, 59 VL, | |
| | 60 VL, 61 VL, 62 | |
| | VL, 63 VL, 65 VL, | |
| | 66 VL, 69 VL, 70 | |
| | VL, 71 VL, 72 VL, | |
| | 76 VL, 77 VL, 78 | |
| | VL, 91 VL, 92 VL, | |
| | 93 VL, 97 VL, 98 | |
| | VL, 99 VL, 140 VL, | |
| | 142 VL, 143 VL, 182 | |
| | VL, 183 VL, 184 VL, | |
| | 185 VL, 186 VL, 187 | |
| | VL, 189 VL, 190 VL, | |
| | 191 VL, 192 VL, 206 | |
| | VL, 207 VL, 208 VL, | |
| | 209 VL, 210 VL, 18- | |
| | 7 S93E VL, clone 34 | |
| | VL, clone 2 VL, | |
| | clone 46 VL, clone | |
| | 47 VL, clone 23 VL, | |
| | clone 53 | |
| 203 | 15 VL, 18-7, L8, | EIVLTQSPGTLSLSPGERATLSCRASSSVSYMYWYQQKPGQAPRLLIYAT |
| | clone L8mod VL, | SNLASGIPDRFSGSGSGTDFTLTISRLEPEDFAVYYCQQWSGNPRTFGGG |
| | clone X-V VL, clone | TKLEIK |
| | X VL, clone H3-1 | |
| | VL, clone H2-2 VL, | |
| | clone H2-5 VL | |
| 204 | 30 VL, 100 VL, | EIVLTQSPGTLSLSPGERATLSCRASSSVSYMYWYQQKPGQAPRLLIYAT |
| | 129 VL, 122 VL, | SNLASGIPDRFSGSGSGTDFTLTISRLEPEDFAVYYCQQWKGNPRTFGGG |
| | 127 VL, 126 VL, | TKLEIK |
| | 160 VL, 157 VL, | |
| | 159 VL, 158 VL, | |
| | 125 VL, 103 VL, 101 | |
| | VL, 102 VL, 104 VL, | |
| | 105 VL, 121 VL, 123 | |
| | VL, 124 VL, 128 VL, | |
| | 144 VL, 161 VL, 162 | |
| | VL, 163 VL, 164 VL, | |
| | clone L3-13 VL | |
| 205 | 110 VL, 197 VL, | EIVLTQSPGTLSLSPGERATLSCRASSSVSYMYWYQQKPGQAPRP |
| | 112 VL, 169 VL, | WIYATSNLASGIPDRFSGSGSGTDFTLTISRLEPEDFAVYYCQQW |
| | 173 VL, 115 VL, | EGNPRTFGGGTKLEIK |
| | 113 VL, 96 VL, | |
| | 196 VL, 172 VL, | |
| | 75 VL, 174 VL, | |
| | 109 VL, 198 VL, | |
| | 170 VL, 29 VL, 31 | |
| | VL, 32 VL, 73 VL, | |
| | 74 VL, 95 VL, 108 | |
| | VL, 111 VL, 114 VL, | |
| | 116 VL, 117 VL, 118 | |
| | VL, 119 VL, 120 VL, | |
| | 130 VL, 153 VL, 154 | |
| | VL, 155 VL, 156 VL, | |
| | 165 VL, 166 VL, 167 | |
| | VL, 168 VL, 171 VL, | |
| | 193 VL, 194 VL, 195 | |
| | VL, 220 VL | |
| 206 | 134 VL, 132 VL, 133 | EIVLTQSPGTLSLSPGERATLSCRASSSVSYMYWYQQKPGQAPRP |
| | VL, 135 VL, 136 VL | LIYATSNLASGIPDRFSGSGSGTDFTLTISRLEPEDFAVYYCQQWK |
| | | GNPRTFGGGTKLEIK |
| 207 | 138 VL, 137 VL, 139 | EIVLTQSPGTLSLSPGERATLSCRASSSVSYMYWYQQKPGQAPRL |
| | VL, 141 VL, clone | LIYATSNLASGIPDRFSGSGSGTDFTLTISRLEPEDFAVYYCQQWS |
| | XL3-15 | VL RNPRTFGGGTKLEIK |
| 208 | 34 VL, 35 VL, 36 | EIVLTQSPGTLSASPGERATMSCRASSSVSYMYWYQQKPGQAPR |
| | VL, 37 VL, 38 VL, | PWIYATSNLASGVPDRFSGSGSGTDYTLTISRVEPEDFAVYYCQQ |
| | 39 VL, 40 VL, 41 | WSGNPRTFGGGTKLEIK |
| | VL, 42 VL, 43 VL, | |
| | 44 VL, 45 VL, 46 | |
| | VL, 47 VL, 53 VL, | |
| | 54 VL, 55 VL, 79 | |
| | VL, 81 VL, 82 VL, | |
| | 83 VL, AS12824 VL | |
| 209 | 85 VL | EIVLTQSPGTLSLSPGERATLSCRASSSVSYMYWYQQKPGQAPRL |
| | | LIYATSNLASGVPDRFSGSGSGTDFTLTISRLEPEDFAVYYCQQW |
| | | EGNPRTFGGGTKLEIK |
| 210 | 48 VL | EIVLTQSPGTLSASPGERATLSCRASSSVSYMYWYQQKPGQAPRP |
| | | WIYATSNLASGVPDRFSGSGSGTDYTLTISRVEPEDFAVYYCQQ |
| | | WSGNPRTFGGGTKLEIK |
| 211 | 49 VL | EIVLTQSPGTLSASPGERATMSCRASSSVSYMYWYQQKPGQAPR |
| | | LLIYATSNLASGVPDRFSGSGSGTDYTLTISRVEPEDFAVYYCQQ |
| | | WSGNPRTFGGGTKLEIK |
| 212 | 50 VL | EIVLTQSPGTLSASPGERATMSCRASSSVSYMYWYQQKPGQAPR |
| | | PWIYATSNLASGVPDRFSGSGSGTDFTLTISRVEPEDFAVYYCQQ |
| | | WSGNPRTFGGGTKLEIK |
| 213 | 51 VL | EIVLTQSPGTLSASPGERATMSCRASSSVSYMYWYQQKPGQAPR |
| | | PWIYATSNLASGVPDRFSGSGSGTDYTLTISRLEPEDFAVYYCQQ |
| | | WSGNPRTFGGGTKLEIK |
| 214 | 52 VL | EIVLTQSPGTLSASPGERATMSCRASSSVSYMYWYQQKPGQAPR |
| | | PWIYATSNLASGVPDRFSGSGSGTDFTLTISRLEPEDFAVYYCQQ |
| | | WSGNPRTFGGGTKLEIK |
| 215 | 56 VL | EIVLTQSPGTLSASPGERATMSCRASSSVSYMYWYQQKPGQAPR |
| | | PWIYATSNLASGIPDRFSGSGSGTDYTLTISRVEPEDFAVYYCQQ |
| | | WSGNPRTFGGGTKLEIK |
| 216 | 86 VL | EIVLTQSPGTLSLSPGERATLSCRASSSVSYMYWYQQKPGQAPRL |
| | | LIYATSNLASGIPDRFSGSGSGTDYTLTISRLEPEDFAVYYCQQWE |
| | | GNPRTFGGGTKLEIK |
| 217 | 87 VL | EIVLTQSPGTLSLSPGERATLSCRASSSVSYMYWYQQKPGQAPRL |
| | | LIYATSNLASGIPDRFSGSGSGTDFTLTISRVEPEDFAVYYCQQWE |
| | | GNPRTFGGGTKLEIK |
| 218 | 88 VL | EIVLTQSPGTLSLSPGERATLSCRASSSVSYMYWYQQKPGQAPRL |
| | | LIYATSNLASGIPDRFSGSGSGTDYTLTISRVEPEDFAVYYCQQWE |
| | | GNPRTFGGGTKLEIK |
| 219 | 89 VL | EIVLTQSPGTLSASPGERATLSCRASSSVSYMYWYQQKPGQAPRL |
| | | LIYATSNLASGIPDRFSGSGSGTDFTLTISRLEPEDFAVYYCQQWE |
| | | GNPRTFGGGTKLEIK |
| 220 | 90 VL | EIVLTQSPGTMSLSPGERATLSCRASSSVSYMYWYQQKPGQAPR |
| | | LLIYATSNLASGIPDRFSGSGSGTDFTLTISRLEPEDFAVYYCQQW |
| | | EGNPRTFGGGTKLEIK |
| 1264 | 5C3D11 VL | QIVLSQSPAILSASPGEKVTMTCRASSSVSYMYWYQQKPGSSPKP |
| | | WIYATSNLASGVPDRFSGSGSGTSYSLTISRVEAEDAATYYCQQ |
| | | WSGNPRTFGGGTKLEIK |
| 1265 | 9E12E5 VL | MKLPVRLLVLMFWIPASSSDVLMTQTPLSLPVSLGDQASISCRSS |
| | | QTIVHSNGDTYLDWFLQKPGQSPKLLIYKVSNRFSGVPDRFSGSG |
| | | SGTDFTLKISRVEAEDLGVYYCFQGSHVPYTFGGGTKLEIK |
| 1266 | AS12823 VL | EIVLTQSPGTLSLSPGERATMSCRASSSVSYMYWYQQKPGQAPR |
| | | PWIYATSNLASGIPDRFSGSGSGTDFTLTISRVEPEDFAVYYCQQ |
| | | WSGNPRTFGGGTKLEIK |
| 1267 | AS12819 VL | EIVLTQSPGTLSLSPGERVTMSCRASSSVSYMYWYQQKPGQAPR |
| | | PWIYATSNLASGVPDRFSGSGSGTDFTLTISRVEPEDFAVYYCQQ |
| | | WSGNPRTFGGGTKVEIK |
| 1268 | AS12816 VL | EIVLTQSPGTLSASPGERVTLSCRASSSVSYMYWYQQKPGQAPRP |
| | | WIYATSNLASGVPDRFSGSGSGTDFTLTISRLEPEDFAVYYCQQW |
| | | SGNPRTFGGGTKLEIK |
| 1269 | AS12825 VL | EIVLTQSPGTLSASPGERVTMSCRASSSVSYMYWYQQKPGQAPR |
| | | LLIYATSNLASGVPDRFSGSGSGTDFTLTISRVEPEDFAVYYCQQ |
| | | WSGNPRTFGGGTKLEIK |
| 1270 | 12835 VL | EIVLTQSPGTLSLSPGERVTMSCRASSSVSYMYWYQQKPGQAPR |
| | | PWIYATSNLASGVPDRFSGSGSGTDYTLTISRLEPEDFAVYYCQQ |
| | | WSGNPRTFGGGTKLEIK |
| 1271 | 21-3 VL | EIVLTQSPGTLSLSPGERATLSCRASSSVSYMYWYQQKPGQAPRL |
| | | LIYATSNLASGVPDRFSGSGSGTDYTLTISRLEPEDFAVYYCQQW |
| | | SGNPRTFGGGTKLEIK |
| 1272 | 18-7 592D VL | EIVLTQSPGTLSLSPGERATLSCRASSSVSYMYWYQQKPGQAPRL |
| | | LIYATSNLASGIPDRFSGSGSGTDFTLTISRLEPEDFAVYYCQQWD |
| | | GNPRTFGGGTKLEIK |
| 1273 | 18-7 592H VL | EIVLTQSPGTLSLSPGERATLSCRASSSVSYMYWYQQKPGQAPRL |
| | | LIYATSNLASGIPDRFSGSGSGTDFTLTISRLEPEDFAVYYCQQWH |
| | | GNPRTFGGGTKLEIK |
| 1274 | 18-7 S92N VL | EIVLTQSPGTLSLSPGERATLSCRASSSVSYMYWYQQKPGQAPRL |
| | | LIYATSNLASGIPDRFSGSGSGTDFTLTISRLEPEDFAVYYCQQWN |
| | | GNPRTFGGGTKLEIK |
| 1275 | 18-7 S92Q VL, clone | EIVLTQSPGTLSLSPGERATLSCRASSSVSYMYWYQQKPGQAPRL |
| | 14 VL, clone 16L | LIYATSNLASGIPDRFSGSGSGTDFTLTISRLEPEDFAVYYCQQWQ |
| | VL, clone 17L VL, | GNPRTFGGGTKLEIK |
| | clone 17L-1 VL, | |
| | clone 3-17L V-A VL, | |
| | clone 3-17L VL | |
| 1276 | 18-7 CDRv VL | EIVLTQSPGTLSLSPGERATLSCRASSSVSYMYWYQQKPGQAPRLLIYATS |
| | | NLASGIPDRFSGSGSGTDFTLTISRLEPEDFAVYYCX₁QWX₂X₃X₄PRTFGG |
| | | GTKLEIK |
| | | X₁ = Q or N |
| | | X₂ = D, E, H, N, Q, or S |
| | | X₃ = A or G |
| | | X₄ = D, F, K, N, R, S, or T |
| 1277 | Clone 52 VL, clone | EIVLTQSPGTLSLSPGERATLSCGASSSVSYMYWYQQKPGQAPRL |
| | A1 VL, clone E1 VL | LIYATSNLASGIPDRFSGSGSGTDFTLTISRLEPEDFAVYYCQQWE |
| | | GNPRTFGGGTKLEIK |
| 1278 | Clone XL3-6 VL | EIVLTQSPGTLSLSPGERATLSCRASSSVSYMYWYQQKPGQAPRL |
| | | LIYATSNLASGIPDRFSGSGSGTDFTLTISRLEPEDFAVYYCSQWS |
| | | GNPRTFGGGTKLEIK |
| 1279 | Clone XL3-10 VL | EIVLTQSPGTLSLSPGERATLSCRASSSVSYMYWYQQKPGQAPRL |
| | | LIYATSNLASGIPDRFSGSGSGTDFTLTISRLEPEDFAVYYCQQWS |
| | | GNPRSFGGGTKLEIK |
| 1280 | M1 VL | DIVMTQSPDSLAVSLGERATINCKSSQSILYSSNNKNYLAWYQQK |
| | | PGQPPKLLIYWASTRESGVPDRFSGSGSGTDFTLTISSLQAEDVS |
| | | VYYCQQYYSTPFTFGPGTKVDIK |
| 1281 | M2 VL | DIMLTQTPLTSPVTLGQPASISCKSSQSLVHSDGNTYLSWLQQRP |
| | | GQPPRLLFYKISNRFSGVPDRFSGSGAGTDFTLKISRVEAEDVGV |
| | | YYCMQATQFPLTFGGGTKVEIK |
| 1282 | M3 VL | EIVLTQSPATLSLSPGERATLSCRASQSVSSYLAWYQQKPGQAPR |
| | | LLIYDASNRATGIPARFSGSGSGTDFTLTISSLEPEDFAVYYCQQR |
| | | SNWPWTFGQGTKVEIK |
| 1283 | M3 VL | EIVLTQSPATLSLSPGERATLSCRASQSVSSYLAWYQQKPGQAPR |
| | | LLIYDASNRATGIPARFSGSGSGTDFTLTISSLEPEDFAVYYCQQR |
| | | SNWPWTFGQGTKVEIKRTVAAPSVFIFPPSDEQLKSGTASVVCLL |
| | | NNFYPREAKVQWKVDNALQSGNSQESVTEQDSKDSTYSLSSTLT |
| | | LSKADYEKHKVYACEVTHQGLSSPVTKSFNRGEC |
| 1284 | M4 VL | AIQLTQSPSSLSASVGDRVTITCRASQGISSALAWYQQKPGKAPK |
| | | LLIYDASSLESGVPSRFSGSGSGTDFTLTISSLQPEDFATYYCQQFN |
| | | SYPLTFGGGTKVEIK |
| 1285 | M5 VL | DIQLTQSPSFLSASVGDRVTITCSASSSVNYMHWYQQKPGKAPKL |
| | | LIYSTSNLASGVPSRFSGSGSGTEFTLTISSLQPEDFATYYCHQWN |
| | | NYGTFGQGTKVEIKR |
| 1286 | M6 VL | DVVMTQSPLSLPVTLGQPASISCKSSQNIVHSDGNTYLEWFQQRP |
| | | GQSPRRLIYKVSNRFSGVPDRFSGSGSGTDFTLKISRVEAEDVGV |
| | | YYCFQGSHVPLTFGGGTKVEIKR |
| 1287 | M6 VL | DVVMTQSPLSLPVTLGQPASISCKSSQNIVHSDGNTYLEWFQQRP |
| | | GQSPRRLIYKVSNRFSGVPDRFSGSGSGTDFTLKISRVEAEDVGV |
| | | YYCFQGSHVPLTFGQGTKVEIKR |
| 1288 | M6 VL | DVVMTQTPLSLPVTPGEPASISCKSSQNIVHSDGNTYLEWYLQKP |
| | | GQSPQLLIYKVSNRFSGVPDRFSGSGSGTDFTLKISRVEAEDLGV |
| | | YYCFQGSHVPLTFGGGTKVEIKR |
| 1289 | M6 VL | DVVMTQTPLSLPVSLGDQASISCKSSQNIVHSDGNTYLEWYLQK |
| | | PGQSPKVLIYKVSNRFSGVPDRFSGSGSGTDFTLKISRVEAEDLGV |
| | | YYCFQGSHVPLTFGGGTKVEIKR |
| 1290 | M6 VL | DVVMTQSPLSLPVTLGQPASISCRSSQSIVHSNGNTYLDWFQQRP |
| | | GQSPRRLIYKVSNRFSGVPDRFSGSGSGTDFTLKISRVEAEDVGV |
| | | YYCFQGSHVPLTFGGGTKVEIKR |
| 1291 | M6 VL | DVVMTQSPLSLPVTLGQPASISCRSSQSIVHSNGNTYLDWFQQRP |
| | | GQSPRRLIYKVSNRFSGVPDRFSGSGSGTDFTLKISRVEAEDVGV |
| | | YYCFQGSHVPLTFGQGTKVEIKR |
| 1292 | M6 VL | DVVMTQTPLSLPVTPGEPASISCRSSQSIVHSNGNTYLDWYLQKP |
| | | GQSPQLLIYKVSNRFSGVPDRFSGSGSGTDFTLKISRVEAEDLGV |
| | | YYCFQGSHVPLTFGGGTKVEIKR |
| 1293 | M6 VL | DVVMTQTPLSLPVSLGDQASISCRSSQSIVHSNGNTYLDWYLQKP |
| | | GQSPKVLIYKVSNRFSGVPDRFSGSGSGTDFTLKINRVEAEDLGV |
| | | YFCFQGSHVPLTFGGGTKLEIKR |
| 1294 | M7 VL | DIQMNQSPSSLSASLGDTITITCHASQNINVLLSWYQQKPGNIPKL |
| | | LIYKASNLHTGVPSRFSGSGSGTGFTFTISSLQPEDIATYYCQQGQ |
| | | SYPYTFGGGTKLEIK |
| 1295 | M7 VL | DIQMTQSPSSLSASVGDRVTITCQASQDISNYLNWYQQKPGKAP |
| | | KLLIYDASNLETGVPSRFSGSGSGTDFTFTISSLQPEDIATYYCQQ |
| | | YDNLPYTFGQGTKLEIK |
| 1296 | M7 VL | DIQMTQSPSSLSASVGDRVTITCQASQNINVLLNWYQQKPGKAP |
| | | KLLIYKASNLHTGVPSRFSGSGSGTDFTFTISSLQPEDIATYYCQQ |
| | | GQSYPYTFGQGTKLEIK |
| 1297 | M7 VL | DIQMNQSPSSLSASVGDRVTITCQASQNINVLLSWYQQKPGKAP |
| | | KLLIYKASNLHTGVPSRFSGSGSGTDFTFTISSLQPEDIATYYCQQ |
| | | GQSYPYTFGQGTKLEIK |
| 1298 | M8 VL | QSVLTQPPSVSGAPGQRVTISCTSSSSDIGAXXGVXWYQQLPGTA |
| | | PKLLIEGYYNRPSGVPDRFSGSKSGTSASLTITGLLPEDEGDYYCQ |
| | | SXDGTLSALFGGGTKLTVLG |
| 1299 | M8 VL | QSVLTQPPSVSGAPGQRVTISCTSSSSDIGAGLGVHWYQQLPGTA |
| | | PKLLIEGYYNRPSGVPDRFSGSKSGTSASLTITGLLPEDEGDYYCQ |
| | | SWDGTLSALFGGGTKLTVLG |
| 1300 | M8 VL | QSVLTQPPSVSGAPGQRVTISCTSSSSDIGAGLGVHWYQQLPGTA |
| | | PKLLIEGYYNRPSGVPDRFSGSKSGTSASLTITGLLPEDEGDYYCQ |
| | | SYDGTLSALFGGGTKLTVLG |
| 1304 | M8 VL | QSVLTQPPSVSGAPGQRVTISCTSSSSDIGAALGVHWYQQLPGTA |
| | | PKLLIEGYYNRPSGVPDRFSGSKSGTSASLTITGLLPEDEGDYYCQ |
| | | SWDGTLSALFGGGTKLTVLG |
| 1305 | M8 VL | QSVLTQPPSVSGAPGQRVTISCTSSSSDIGAGSGVHWYQQLPGTA |
| | | PKLLIEGYYNRPSGVPDRFSGSKSGTSASLTITGLLPEDEGDYYCQ |
| | | SWDGTLSALFGGGTKLTVLG |
| 1306 | M8 VL | QSVLTQPPSVSGAPGQRVTISCTSSSSDIGAGQGVHWYQQLPGTA |
| | | PKLLIEGYYNRPSGVPDRFSGSKSGTSASLTITGLLPEDEGDYYCQ |
| | | SWDGTLSALFGGGTKLTVLG |
| 1307 | M8 VL | QSVLTQPPSVSGAPGQRVTISCTSSSSDIGAGLGVLWYQQLPGTA |
| | | PKLLIEGYYNRPSGVPDRFSGSKSGTSASLTITGLLPEDEGDYYCQ |
| | | SWDGTLSALFGGGTKLTVLG |
| 1308 | M8 VL | QSVLTQPPSVSGAPGQRVTISCTSSSSDIGAGLGVHWYQQLPGTA |
| | | PKLLIEGYYNRPSGVPDRFSGSKSGTSASLTITGLLPEDEGDYYCQ |
| | | SWDGTLSALFGGGTKLTVLG |
| 1309 | M8 VL | QSVLTQPPSVSGAPGQRVTISCTSSSSDIGAGSGVHWYQQLPGTA |
| | | PKLLIEGYYNRPSGVPDRFSGSKSGTSASLTITGLLPEDEGDYYCQ |
| | | SWDGTLSALFGGGTKLTVLG |
| 1310 | M8 VL | QSVLTQPPSVSGAPGQRVTISCTSSSSDIGAGQGVHWYQQLPGTA |
| | | PKLLIEGYYNRPSGVPDRFSGSKSGTSASLTITGLLPEDEGDYYCQ |
| | | SWDGTLSALFGGGTKLTVLG |
| 1311 | M8 VL | QSVLTQPPSVSGAPGQRVTISCTSSSSDIGAGLGVLWYQQLPGTA |
| | | PKLLIEGYYNRPSGVPDRFSGSKSGTSASLTITGLLPEDEGDYYCQ |
| | | SWDGTLSALFGGGTKLTVLG |
| 1312 | M8 VL | QSVLTQPPSVSGAPGQRVTISCTSSSSDIGAGLGVHWYQQLPGTA |
| | | PKLLIEGYYNRPSGVPDRFSGSKSGTSASLTITGLLPEDEGDYYCQ |
| | | SFDGTLSALFGGGTKLTVLG |
| 1313 | M9 VL | DIQMTQSPSSLSASVGDRVTITCRASQSINNYLNWYQQRPGKAPK |
| | | LLIYAASSLQSGVPSRFSGSGSGTDFTLTISSLQPGDFATYYCQQS |
| | | YSTPRTFGQGTKLEIK |
| 1314 | M10 VL | EIVLTQSPGTLSLSPGERATLSCRASQSVRSSYLAWYQQKPGQAP |
| | | RLLIYGASSRATGIPDRFSGSGSGTDFTLTISRLEPEDFAVYYCQQ |
| | | YGSSPTFGQGTRLEIK |
| 1315 | M11 VL | DIQMTQSPSTLSASVGDRVTITCRASQTISSWLAWYQQTPEKAPK |
| | | LLIYAASNLQSGVPSRFSGSGSGTEFTLTISSLQPDDFATYYCQQY |
| | | HRSWTFGQGTKVEIT |
| 1316 | M12 VL | DVLMTQTPLSLPVSLGDQASISCRSSQNIVHSDGNTYLEWYLQKP |
| | | GQSPKLLIYKVSNRFSGVPDRFSGSGSGTDFTLKISRVEAEDLGIY |
| | | YCFQGSHVPLTFGAGTKLELK |
| 303 | Variable Light | EIVLTQSPGTLSLSPGERATLSC[LCDR1]WYQQKPGQAPRX10X11 |
| | | IY[LCDR2]GIPDRFSGSGSGTDFTLTISRLEPEDFAVYYC[LCDR3]F |
| | | GGGTKLEIK |
| | | wherein each of X10 and X11 is independently selected |
| | | from A, R, N, D, C, Q, E, G, H, I, L, K, M, F, P, S, |
| | | T, W, Y, or V |
| | | In some cases, X10 = L or P |
| | | In some cases, X11 = L or W |

TABLE 2F
Additional sequences

| SEQ | | |
|---|---|---|
| ID NO | Description | Sequence |
| 304 | 219 HC FR1, | [sequence omitted] |
| | 212 HC FR1 | |
| 305 | 219 HC FR2 | WVKQRPGQGLEWMG |
| 313 | 212 HC FR2 | WVRQRPGQGLEWIG |
| 1317 | HC FR2 | WVRQAPGQGLEWMG |
| 306 | 219 HC FR3a | RVTITRDTSTSTVYLELSSLRSEDTAVYYCAR |
| 307 | 219 HC FR3b | RVTITRDTSTSTVYLELSSLRSEDTAVYYC |
| 314 | 212 HC FR3a | RATITTDTSTSTAYLELSSLRSEDTAVYYCAR |
| 315 | 212 HC FR3b | RATITTDTSTSTAYLELSSLRSEDTAVYYC |
| 1318 | HC FR3 | RVTMTRDTSTSTVYMELSSLRSEDTAVYYC |
| 1319 | HC FR3 | RATITTDTSASTAYLQLSSLRSEDTAVYYC |
| 1320 | HC FR3 | RVTITRDTSASTVYMELSSLRSEDTAVYYC |
| 1321 | HC FR3 | RVTITRDTSASTAYMELSSLRSEDTAVYYC |
| 1322 | HC FR3 | RVTMTRDTSTSTVYMELSSLRSEDTAVYYCSR |
| 1323 | HC FR3 | RVTMTRDTSTSTVYMELSSLRSEDTAVYYCAR |
| 308 | 219 HC FR4, | WGQGTTVTVSS |
| | 212 HC FR4 | |
| 309 | 219 LC FR1, | EIVLTQSPGTLSLSPGERATLSC |
| | 212 LC FR1 | |
| 310 | 219 LC FR2, | WYQQKPGQAPRPLIY |
| | 212 LC FR2 | |
| 1324 | LC FR2 | WYQQKPGQAPRLLIY |
| 311 | 219 LC FR3, | GIPDRFSGSGSGTDFTLTISRLEPEDFAVYYC |
| | 212 LC FR3 | |
| 1325 | LC FR3 | GVPDRFSGSGSGTDYTLTISRLEPEDFAVYYC |
| 312 | 219 LC FR4, | FGGGTKLEIK |
| | 212 LC FR4 | |
| 316 | IGHV1-46*02 | QVQLVQSGAEVKKPGASVKVSCKASGYTFNSYYMHWVRQAPG |
| | | QGLEWMGIINPSGGSTSYAQKFQGRVTMTRDTSTSTVYMELSSL |
| | | RSEDTAVYYCAR |
| 317 | IGKV3-20*01 | EIVLTQSPGTLSLSPGERATLSCRASQSVSSSYLAWYQQKPGQAP |
| | | RLLIYGASSRATGIPDRFSGSGSGTDFTLTISRLEPEDFAVYYCQQ |
| | | YGSSP |
| 319 | Light Chain | RTVAAPSVFIFPPSDEQLKSGTASVVCLLNNFYPREAKVQWKVDNALQS |
| | Constant | GNSQESVTEQDSKDSTYSLSSTLTLSKADYEKHKVYACEVTHQGLSSPVT |
| | | KSFNRGEC |

TABLE 2G
Fc and constant regions

SEQ ID NO: 320 IgG1 Constant
[sequence omitted]
SEQ ID NO: 321 IgG1 Constant
ASTKGPSVFPLAPSSKSTSGGTAALGCLVKDYFPEPVTVSWNSGALTSGVHTFPAVLQSSGLY
SLSSVVTVPSSSLGTQTYICNVNHKPSNTKVDKRVEPKSCDKTHTCPPCPAPELLGGPSVFLFP
PKPKDTLMISRTPEVTCVVVDVSHEDPEVKFNWYVDGVEVHNAKTKPREEQYNSTYRVVSV
LTVLHQDWLNGKEYKCKVSNKALPAPIEKTISKAKGQPREPQVYTLPPSREEMTKNQVSLTC
LVKGFYPSDIAVEWESNGQPENNYKTTPPVLDSDGSFFLYSKLTVDKSRWQQGNVFSCSVMH
EALHNHYTQKSLSLSPGK
SEQ ID NO: 322 IgG1 Constant
ASTKGPSVFPLAPSSKSTSGGTAALGCLVKDYFPEPVTVSWNSGALTSGVHTFPAVLQSSGLY
SLSSVVTVPSSSLGTQTYICNVNHKPSNTKVDKKVEPKSCDKTHTCPPCPAPELLGGPSVFLFP
PKPKDTLMISRTPEVTCVVVDVSHEDPEVKFNWYVDGVEVHNAKTKPREEQYNSTYRVVSV
LTVLHQDWLNGKEYKCKVSNKALPAPIEKTISKAKGQPREPQVYTLPPSREEMTKNQVSLTC
LVKGFYPSDIAVEWESNGQPENNYKTTPPVLDSDGSFFLYSKLTVDKSRWQQGNVFSCSVMH
EALHNHYTQKSLSLSPGK
SEQ ID NO: 323 Fcl (L235E)
ASTKGPSVFPLAPSSKS1SGGTAALGCLVKDYFPEPVTVSWNSGALTSGVHTFPAVLQSSGLY
SLSSVVTVPSSSLGTQTYICNVNHKPSNTKVDKKVEPKSCDKTHTCPPCPAPELEGGPSVFLFP
PKPKDTLMISRTPEVTCVVVDVSHEDPEVKFNWYVDGVEVHNAKTKPREEQYNSTYRVVSV
LTVLHQDWLNGKEYKCKVSNKALPAPIEKTISKAKGQPREPQVYTLPPSRDELTKNQVSLTCL
VKGFYPSDIAVEWESNGQPENNYKTTPPVLDSDGSFFLYSKLTVDKSRWQQGNVFSCSVMHE
ALHNHYTQKSLSLSPGK
SEQ ID NO: 324 Fc2 (L235E)
ASTKGPSVFPLAPSSKSTSGGTAALGCLVKDYFPEPVTVSWNSGALTSGVHTFPAVLQSSGLY
SLSSVVTVPSSSLGTQTYICNVNHKPSNTKVDKRVEPKSCDKTHTCPPCPAPELEGGPSVFLFP
PKPKDTLMISRTPEVTCVVVDVSHEDPEVKFNWYVDGVEVHNAKTKPREEQYNSTYRVVSV
LTVLHQDWLNGKEYKCKVSNKALPAPIEKTISKAKGQPREPQVYTLPPSREEMTKNQVSLTC
LVKGFYPSDIAVEWESNGQPENNYKTTPPVLDSDGSFFLYSKLTVDKSRWQQGNVFSCSVMH
EALHNHYTQKSLSLSPGK
SEQ ID NO: 325 Fc3 (L235E)
ASTKGPSVFPLAPSSKSTSGGTAALGCLVKDYFPEPVTVSWNSGALTSGVHTFPAVLQSSGLY
SLSSVVTVPSSSLGTQTYICNVNHKPSNTKVDKKVEPKSCDKTHTCPPCPAPELEGGPSVFLFP
PKPKDTLMISRTPEVTCVVVDVSHEDPEVKFNWYVDGVEVHNAKTKPREEQYNSTYRVVSV
LTVLHQDWLNGKEYKCKVSNKALPAPIEKTISKAKGQPREPQVYTLPPSREEMTKNQVSLTC
LVKGFYPSDIAVEWESNGQPENNYKTTPPVLDSDGSFFLYSKLTVDKSRWQQGNVFSCSVMH
EALHNHYTQKSLSLSPGK
SEQ ID NO: 326 Fc4 (L234A, L235A)
ASTKGPSVFPLAPSSKSTSGGTAALGCLVKDYFPEPVTVSWNSGALTSGVHTFPAVLQSSGLY
SLSSVVTVPSSSLGTQTYICNVNHKPSNTKVDKKVEPKSCDKTHTCPPCPAPEAAGGPSVFLFP
PKPKDTLMISRTPEVTCVVVDVSHEDPEVKFNWYVDGVEVHNAKTKPREEQYNSTYRVVSV
LTVLHQDWLNGKEYKCKVSNKALPAPIEKTISKAKGQPREPQVYTLPPSRDELTKNQVSLTCL
VKGFYPSDIAVEWESNGQPENNYKTTPPVLDSDGSFFLYSKLTVDKSRWQQGNVFSCSVMHE
ALHNHYTQKSLSLSPGK
SEQ ID NO: 327 Fc5 (L234A, L235A)
ASTKGPSVFPLAPSSKSTSGGTAALGCLVKDYFPEPVTVSWNSGALTSGVHTFPAVLQSSGLY
SLSSVVTVPSSSLGTQTYICNVNHKPSNTKVDKRVEPKSCDKTHTCPPCPAPEAAGGPSVFLFP
PKPKDTLMISRTPEVTCVVVDVSHEDPEVKFNWYVDGVEVHNAKTKPREEQYNSTYRVVSV
LTVLHQDWLNGKEYKCKVSNKALPAPIEKTISKAKGQPREPQVYTLPPSREEMTKNQVSLTC
LVKGFYPSDIAVEWESNGQPENNYKTTPPVLDSDGSFFLYSKLTVDKSRWQQGNVFSCSVMH
EALHNHYTQKSLSLSPGK
SEQ ID NO: 328 Fc6 (L234A, L235A)
ASTKGPSVFPLAPSSKSTSGGTAALGCLVKDYFPEPVTVSWNSGALTSGVHTFPAVLQSSGLY
SLSSVVTVPSSSLGTQTYICNVNHKPSNTKVDKKVEPKSCDKTHTCPPCPAPEAAGGPSVFLFP
PKPKDTLMISRTPEVTCVVVDVSHEDPEVKFNWYVDGVEVHNAKTKPREEQYNSTYRVVSV
LTVLHQDWLNGKEYKCKVSNKALPAPIEKTISKAKGQPREPQVYTLPPSREEMTKNQVSLTC
LVKGFYPSDIAVEWESNGQPENNYKTTPPVLDSDGSFFLYSKLTVDKSRWQQGNVFSCSVMH
EALHNHYTQKSLSLSPGK
SEQ ID NO: 329 Fc7 (L234A, L235A, G237A)
ASTKGPSVFPLAPSSKSTSGGTAALGCLVKDYFPEPVTVSWNSGALTSGVHTFPAVLQSSGLY
SLSSVVTVPSSSLGTQTYICNVNHKPSNTKVDKKVEPKSCDKTHTCPPCPAPEAAGAPSVFLFP
PKPKDTLMISRTPEVTCVVVDVSHEDPEVKFNWYVDGVEVHNAKTKPREEQYNSTYRVVSV
LTVLHQDWLNGKEYKCKVSNKALPAPIEKTISKAKGQPREPQVYTLPPSRDELTKNQVSLTCL
VKGFYPSDIAVEWESNGQPENNYKTTPPVLDSDGSFFLYSKLTVDKSRWQQGNVFSCSVMHE
ALHNHYTQKSLSLSPG
SEQ ID NO: 330 Fc8 (L234A, L235A, G237A)
ASTKGPSVFPLAPSSKSTSGGTAALGCLVKDYFPEPVTVSWNSGALTSGVHTFPAVLQSSGLY
SLSSVVTVPSSSLGTQTYICNVNHKPSNTKVDKRVEPKSCDKTHTCPPCPAPEAAGAPSVFLFP
PKPKDTLMISRTPEVTCVVVDVSHEDPEVKFNWYVDGVEVHNAKTKPREEQYNSTYRVVSV
LTVLHQDWLNGKEYKCKVSNKALPAPIEKTISKAKGQPREPQVYTLPPSREEMTKNQVSLTC
LVKGFYPSDIAVEWESNGQPENNYKTTPPVLDSDGSFFLYSKLTVDKSRWQQGNVFSCSVMH
EALHNHYTQKSLSLSPG
SEQ ID NO: 331 Fc9 (L234A, L235A, G237A)
ASTKGPSVFPLAPSSKSTSGGTAALGCLVKDYFPEPVTVSWNSGALTSGVHTFPAVLQSSGLY
SLSSVVTVPSSSLGTQTYICNVNHKPSNTKVDKKVEPKSCDKTHTCPPCPAPEAAGAPSVFLFP
PKPKDTLMISRTPEVTCVVVDVSHEDPEVKFNWYVDGVEVHNAKTKPREEQYNSTYRVVSV
LTVLHQDWLNGKEYKCKVSNKALPAPIEKTISKAKGQPREPQVYTLPPSREEMTKNQVSLTC
LVKGFYPSDIAVEWESNGQPENNYKTTPPVLDSDGSFFLYSKLTVDKSRWQQGNVFSCSVMH
EALHNHYTQKSLSLSPG
SEQ ID NO: 332 Fc10 (L234A, L235A, P329G)
ASTKGPSVFPLAPSSKSTSGGTAALGCLVKDYFPEPVTVSWNSGALTSGVHTFPAVLQSSGLY
SLSSVVTVPSSSLGTQTYICNVNHKPSNTKVDKKVEPKSCDKTHTCPPCPAPEAAGGPSVFLFP
PKPKDTLMISRTPEVTCVVVDVSHEDPEVKFNWYVDGVEVHNAKTKPREEQYNSTYRVVSV
LTVLHQDWLNGKEYKCKVSNKALGAPIEKTISKAKGQPREPQVYTLPPSRDELTKNQVSLTC
LVKGFYPSDIAVEWESNGQPENNYKTTPPVLDSDGSFFLYSKLTVDKSRWQQGNVFSCSVMH
EALHNHYTQKSLSLSPGK
SEQ ID NO: 333 Fc11 (L234A, L235A, P329G)
ASTKGPSVFPLAPSSKSTSGGTAALGCLVKDYFPEPVTVSWNSGALTSGVHTFPAVLQSSGLY
SLSSVVTVPSSSLGTQTYICNVNHKPSNTKVDKRVEPKSCDKTHTCPPCPAPEAAGGPSVFLFP
PKPKDTLMISRTPEVTCVVVDVSHEDPEVKFNWYVDGVEVHNAKTKPREEQYNSTYRVVSV
LTVLHQDWLNGKEYKCKVSNKALGAPIEKTISKAKGQPREPQVYTLPPSREEMTKNQVSLTC
LVKGFYPSDIAVEWESNGQPENNYKTTPPVLDSDGSFFLYSKLTVDKSRWQQGNVFSCSVMH
EALHNHYTQKSLSLSPGK
SEQ ID NO: 334 Fc12 (L234A, L235A, P329G)
ASTKGPSVFPLAPSSKSTSGGTAALGCLVKDYFPEPVTVSWNSGALTSGVHTFPAVLQSSGLY
SLSSVVTVPSSSLGTQTYICNVNHKPSNTKVDKKVEPKSCDKTHTCPPCPAPEAAGGPSVFLFP
PKPKDTLMISRTPEVTCVVVDVSHEDPEVKFNWYVDGVEVHNAKTKPREEQYNSTYRVVSV
LTVLHQDWLNGKEYKCKVSNKALGAPIEKTISKAKGQPREPQVYTLPPSREEMTKNQVSLTC
LVKGFYPSDIAVEWESNGQPENNYKTTPPVLDSDGSFFLYSKLTVDKSRWQQGNVFSCSVMH
EALHNHYTQKSLSLSPGK
SEQ ID NO: 335 Fc13 (L234F, L235E, P331S)
ASTKGPSVFPLAPSSKSTSGGTAALGCLVKDYFPEPVTVSWNSGALTSGVHTFPAVLQSSGLY
SLSSVVTVPSSSLGTQTYICNVNHKPSNTKVDKKVEPKSCDKTHTCPPCPAPEFEGGPSVFLFP
PKPKDTLMISRTPEVTCVVVDVSHEDPEVKFNWYVDGVEVHNAKTKPREEQYNSTYRVVSV
LTVLHQDWLNGKEYKCKVSNKALPASIEKTISKAKGQPREPQVYTLPPSRDELTKNQVSLTCL
VKGFYPSDIAVEWESNGQPENNYKTTPPVLDSDGSFFLYSKLTVDKSRWQQGNVFSCSVMHE
ALHNHYTQKSLSLSPGK
SEQ ID NO: 336 Fc14 (L234F, L235E, P331S)
ASTKGPSVFPLAPSSKSTSGGTAALGCLVKDYFPEPVTVSWNSGALTSGVHTFPAVLQSSGLY
SLSSVVTVPSSSLGTQTYICNVNHKPSNTKVDKRVEPKSCDKTHTCPPCPAPEFEGGPSVFLFPP
KPKDTLMISRTPEVTCVVVDVSHEDPEVKFNWYVDGVEVHNAKTKPREEQYNSTYRVVSVL
TVLHQDWLNGKEYKCKVSNKALPASIEKTISKAKGQPREPQVYTLPPSREEMTKNQVSLTCL
VKGFYPSDIAVEWESNGQPENNYKTTPPVLDSDGSFFLYSKLTVDKSRWQQGNVFSCSVMHE
ALHNHYTQKSLSLSPGK
SEQ ID NO: 337 Fc15 (L234F, L235E, P331S)
ASTKGPSVFPLAPSSKSTSGGTAALGCLVKDYFPEPVTVSWNSGALTSGVHTFPAVLQSSGLY
SLSSVVTVPSSSLGTQTYICNVNHKPSNTKVDKKVEPKSCDKTHTCPPCPAPEFEGGPSVFLFP
PKPKDTLMISRTPEVTCVVVDVSHEDPEVKFNWYVDGVEVHNAKTKPREEQYNSTYRVVSV
LTVLHQDWLNGKEYKCKVSNKALPASIEKTISKAKGQPREPQVYTLPPSREEMTKNQVSLTC
LVKGFYPSDIAVEWESNGQPENNYKTTPPVLDSDGSFFLYSKLTVDKSRWQQGNVFSCSVMH
EALHNHYTQKSLSLSPGK
SEQ ID NO: 338 Fc16 (L234A, L235E, G237A)
ASTKGPSVFPLAPSSKSTSGGTAALGCLVKDYFPEPVTVSWNSGALTSGVHTFPAVLQSSGLY
SLSSVVTVPSSSLGTQTYICNVNHKPSNTKVDKKVEPKSCDKTHTCPPCPAPEAEGAPSVFLFP
PKPKDTLMISRTPEVTCVVVDVSHEDPEVKFNWYVDGVEVHNAKTKPREEQYNSTYRVVSV
LTVLHQDWLNGKEYKCKVSNKALPAPIEKTISKAKGQPREPQVYTLPPSRDELTKNQVSLTCL
VKGFYPSDIAVEWESNGQPENNYKTTPPVLDSDGSFFLYSKLTVDKSRWQQGNVFSCSVMHE
ALHNHYTQKSLSLSPG
SEQ ID NO: 339 Fc17 (L234A, L235E, G237A)
ASTKGPSVFPLAPSSKSTSGGTAALGCLVKDYFPEPVTVSWNSGALTSGVHTFPAVLQSSGLY
SLSSVVTVPSSSLGTQTYICNVNHKPSNTKVDKRVEPKSCDKTHTCPPCPAPEAEGAPSVFLFP
PKPKDTLMISRTPEVTCVVVDVSHEDPEVKFNWYVDGVEVHNAKTKPREEQYNSTYRVVSV
LTVLHQDWLNGKEYKCKVSNKALPAPIEKTISKAKGQPREPQVYTLPPSREEMTKNQVSLTC
LVKGFYPSDIAVEWESNGQPENNYKTTPPVLDSDGSFFLYSKLTVDKSRWQQGNVFSCSVMH
EALHNHYTQKSLSLSPG
SEQ ID NO: 340 Fc18 (L234A, L235E, G237A)
ASTKGPSVFPLAPSSKSTSGGTAALGCLVKDYFPEPVTVSWNSGALTSGVHTFPAVLQSSGLY
SLSSVVTVPSSSLGTQTYICNVNHKPSNTKVDKKVEPKSCDKTHTCPPCPAPEAEGAPSVFLFP
PKPKDTLMISRTPEVTCVVVDVSHEDPEVKFNWYVDGVEVHNAKTKPREEQYNSTYRVVSV
LTVLHQDWLNGKEYKCKVSNKALPAPIEKTISKAKGQPREPQVYTLPPSREEMTKNQVSLTC
LVKGFYPSDIAVEWESNGQPENNYKTTPPVLDSDGSFFLYSKLTVDKSRWQQGNVFSCSVMH
EALHNHYTQKSLSLSPG
SEQ ID NO: 341 Fc19 (L234A, L235E, G237A, P331S)
ASTKGPSVFPLAPSSKSTSGGTAALGCLVKDYFPEPVTVSWNSGALTSGVHTFPAVLQSSGLY
SLSSVVTVPSSSLGTQTYICNVNHKPSNTKVDKKVEPKSCDKTHTCPPCPAPEAEGAPSVFLFP
PKPKDTLMISRTPEVTCVVVDVSHEDPEVKFNWYVDGVEVHNAKTKPREEQYNSTYRVVSV
LTVLHQDWLNGKEYKCKVSNKALPASIEKTISKAKGQPREPQVYTLPPSRDELTKNQVSLTCL
VKGFYPSDIAVEWESNGQPENNYKTTPPVLDSDGSFFLYSKLTVDKSRWQQGNVFSCSVMHE
ALHNHYTQKSLSLSPG
SEQ ID NO: 342 Fc20 (L234A, L235E, G237A, P331S)
ASTKGPSVFPLAPSSKSTSGGTAALGCLVKDYFPEPVTVSWNSGALTSGVHTFPAVLQSSGLY
SLSSVVTVPSSSLGTQTYICNVNHKPSNTKVDKRVEPKSCDKTHTCPPCPAPEAEGAPSVFLFP
PKPKDTLMISRTPEVTCVVVDVSHEDPEVKFNWYVDGVEVHNAKTKPREEQYNSTYRVVSV
LTVLHQDWLNGKEYKCKVSNKALPASIEKTISKAKGQPREPQVYTLPPSREEMTKNQVSLTC
LVKGFYPSDIAVEWESNGQPENNYKTTPPVLDSDGSFFLYSKLTVDKSRWQQGNVFSCSVMH
EALHNHYTQKSLSLSPG
SEQ ID NO: 343 Fc21 (L234A, L235E, G237A, P331S)
ASTKGPSVFPLAPSSKSTSGGTAALGCLVKDYFPEPVTVSWNSGALTSGVHTFPAVLQSSGLY
SLSSVVTVPSSSLGTQTYICNVNHKPSNTKVDKKVEPKSCDKTHTCPPCPAPEAEGAPSVFLFP
PKPKDTLMISRTPEVTCVVVDVSHEDPEVKFNWYVDGVEVHNAKTKPREEQYNSTYRVVSV
LTVLHQDWLNGKEYKCKVSNKALPASIEKTISKAKGQPREPQVYTLPPSREEMTKNQVSLTC
LVKGFYPSDIAVEWESNGQPENNYKTTPPVLDSDGSFFLYSKLTVDKSRWQQGNVFSCSVMH
EALHNHYTQKSLSLSPG
SEQ ID NO: 344 Fc22 (L234A, L235A, P329A)
ASTKGPSVFPLAPSSKSTSGGTAALGCLVKDYFPEPVTVSWNSGALTSGVHTFPAVLQSSGLY
SLSSVVTVPSSSLGTQTYICNVNHKPSNTKVDKKVEPKSCDKTHTCPPCPAPEAAGGPSVFLFP
PKPKDTLMISRTPEVTCVVVDVSHEDPEVKFNWYVDGVEVHNAKTKPREEQYNSTYRVVSV
LTVLHQDWLNGKEYKCKVSNKALAAPIEKTISKAKGQPREPQVYTLPPSRDELTKNQVSLTC
LVKGFYPSDIAVEWESNGQPENNYKTTPPVLDSDGSFFLYSKLTVDKSRWQQGNVFSCSVMH
EALHNHYTQKSLSLSPGK
SEQ ID NO: 345 Fc23 (L234A, L235A, P329A)
ASTKGPSVFPLAPSSKSTSGGTAALGCLVKDYFPEPVTVSWNSGALTSGVHTFPAVLQSSGLY
SLSSVVTVPSSSLGTQTYICNVNHKPSNTKVDKRVEPKSCDKTHTCPPCPAPEAAGGPSVFLFP
PKPKDTLMISRTPEVTCVVVDVSHEDPEVKFNWYVDGVEVHNAKTKPREEQYNSTYRVVSV
LTVLHQDWLNGKEYKCKVSNKALAAPIEKTISKAKGQPREPQVYTLPPSREEMTKNQVSLTC
LVKGFYPSDIAVEWESNGQPENNYKTTPPVLDSDGSFFLYSKLTVDKSRWQQGNVFSCSVMH
EALHNHYTQKSLSLSPGK
SEQ ID NO: 346 Fc24 (L234A, L235A, P329A)
ASTKGPSVFPLAPSSKSTSGGTAALGCLVKDYFPEPVTVSWNSGALTSGVHTFPAVLQSSGLY
SLSSVVTVPSSSLGTQTYICNVNHKPSNTKVDKKVEPKSCDKTHTCPPCPAPEAAGGPSVFLFP
PKPKDTLMISRTPEVTCVVVDVSHEDPEVKFNWYVDGVEVHNAKTKPREEQYNSTYRVVSV
LTVLHQDWLNGKEYKCKVSNKALAAPIEKTISKAKGQPREPQVYTLPPSREEMTKNQVSLTC
LVKGFYPSDIAVEWESNGQPENNYKTTPPVLDSDGSFFLYSKLTVDKSRWQQGNVFSCSVMH
EALHNHYTQKSLSLSPGK
SEQ ID NO: 347 Fc25 (D265A)
ASTKGPSVFPLAPSSKSTSGGTAALGCLVKDYFPEPVTVSWNSGALTSGVHTFPAVLQSSGLY
SLSSVVTVPSSSLGTQTYICNVNHKPSNTKVDKKVEPKSCDKTHTCPPCPAPELLGGPSVFLFP
PKPKDTLMISRTPEVTCVVVAVSHEDPEVKFNWYVDGVEVHNAKTKPREEQYNSTYRVVSV
LTVLHQDWLNGKEYKCKVSNKALPAPIEKTISKAKGQPREPQVYTLPPSRDELTKNQVSLTCL
VKGFYPSDIAVEWESNGQPENNYKTTPPVLDSDGSFFLYSKLTVDKSRWQQGNVFSCSVMHE
ALHNHYTQKSLSLSPGK
SEQ ID NO: 348 Fc26 (D265A)
ASTKGPSVFPLAPSSKSTSGGTAALGCLVKDYFPEPVTVSWNSGALTSGVHTFPAVLQSSGLY
SLSSVVTVPSSSLGTQTYICNVNHKPSNTKVDKRVEPKSCDKTHTCPPCPAPELLGGPSVFLFP
PKPKDTLMISRTPEVTCVVVAVSHEDPEVKFNWYVDGVEVHNAKTKPREEQYNSTYRVVSV
LTVLHQDWLNGKEYKCKVSNKALPAPIEKTISKAKGQPREPQVYTLPPSREEMTKNQVSLTC
LVKGFYPSDIAVEWESNGQPENNYKTTPPVLDSDGSFFLYSKLTVDKSRWQQGNVFSCSVMH
EALHNHYTQKSLSLSPGK
SEQ ID NO: 349 Fc27 (D265A)
ASTKGPSVFPLAPSSKSTSGGTAALGCLVKDYFPEPVTVSWNSGALTSGVHTFPAVLQSSGLY
SLSSVVTVPSSSLGTQTYICNVNHKPSNTKVDKKVEPKSCDKTHTCPPCPAPELLGGPSVFLFP
PKPKDTLMISRTPEVTCVVVAVSHEDPEVKFNWYVDGVEVHNAKTKPREEQYNSTYRVVSV
LTVLHQDWLNGKEYKCKVSNKALPAPIEKTISKAKGQPREPQVYTLPPSREEMTKNQVSLTC
LVKGFYPSDIAVEWESNGQPENNYKTTPPVLDSDGSFFLYSKLTVDKSRWQQGNVFSCSVMH
EALHNHYTQKSLSLSPGK
SEQ ID NO: 350 Fc28 (N297G)
ASTKGPSVFPLAPSSKSTSGGTAALGCLVKDYFPEPVTVSWNSGALTSGVHTFPAVLQSSGLY
SLSSVVTVPSSSLGTQTYICNVNHKPSNTKVDKKVEPKSCDKTHTCPPCPAPELLGGPSVFLFP
PKPKDTLMISRTPEVTCVVVDVSHEDPEVKFNWYVDGVEVHNAKTKPREEQYGSTYRVVSV
LTVLHQDWLNGKEYKCKVSNKALPAPIEKTISKAKGQPREPQVYTLPPSRDELTKNQVSLTCL
VKGFYPSDIAVEWESNGQPENNYKTTPPVLDSDGSFFLYSKLTVDKSRWQQGNVFSCSVMHE
ALHNHYTQKSLSLSPGK
SEQ ID NO: 351 Fc29 (N297G)
ASTKGPSVFPLAPSSKSTSGGTAALGCLVKDYFPEPVTVSWNSGALTSGVHTFPAVLQSSGLY
SLSSVVTVPSSSLGTQTYICNVNHKPSNTKVDKRVEPKSCDKTHTCPPCPAPELLGGPSVFLFP
PKPKDTLMISRTPEVTCVVVDVSHEDPEVKFNWYVDGVEVHNAKTKPREEQYGSTYRVVSV
LTVLHQDWLNGKEYKCKVSNKALPAPIEKTISKAKGQPREPQVYTLPPSREEMTKNQVSLTC
LVKGFYPSDIAVEWESNGQPENNYKTTPPVLDSDGSFFLYSKLTVDKSRWQQGNVFSCSVMH
EALHNHYTQKSLSLSPGK
SEQ ID NO: 352 Fc30 (N297G)
ASTKGPSVFPLAPSSKSTSGGTAALGCLVKDYFPEPVTVSWNSGALTSGVHTFPAVLQSSGLY
SLSSVVTVPSSSLGTQTYICNVNHKPSNTKVDKKVEPKSCDKTHTCPPCPAPELLGGPSVFLFP
PKPKDTLMISRTPEVTCVVVDVSHEDPEVKFNWYVDGVEVHNAKTKPREEQYGSTYRVVSV
LTVLHQDWLNGKEYKCKVSNKALPAPIEKTISKAKGQPREPQVYTLPPSREEMTKNQVSLTC
LVKGFYPSDIAVEWESNGQPENNYKTTPPVLDSDGSFFLYSKLTVDKSRWQQGNVFSCSVMH
EALHNHYTQKSLSLSPGK
SEQ ID NO: 353 Fc31 (D265A, N297A)
ASTKGPSVFPLAPSSKSTSGGTAALGCLVKDYFPEPVTVSWNSGALTSGVHTFPAVLQSSGLY
SLSSVVTVPSSSLGTQTYICNVNHKPSNTKVDKKVEPKSCDKTHTCPPCPAPELLGGPSVFLFP
PKPKDTLMISRTPEVTCVVVAVSHEDPEVKFNWYVDGVEVHNAKTKPREEQYASTYRVVSV
LTVLHQDWLNGKEYKCKVSNKALPAPIEKTISKAKGQPREPQVYTLPPSRDELTKNQVSLTCL
VKGFYPSDIAVEWESNGQPENNYKTTPPVLDSDGSFFLYSKLTVDKSRWQQGNVFSCSVMHE
ALHNHYTQKSLSLSPGK
SEQ ID NO: 354 Fc32 (D265A, N297A)
ASTKGPSVFPLAPSSKSTSGGTAALGCLVKDYFPEPVTVSWNSGALTSGVHTFPAVLQSSGLY
SLSSVVTVPSSSLGTQTYICNVNHKPSNTKVDKRVEPKSCDKTHTCPPCPAPELLGGPSVFLFP
PKPKDTLMISRTPEVTCVVVAVSHEDPEVKFNWYVDGVEVHNAKTKPREEQYASTYRVVSV
LTVLHQDWLNGKEYKCKVSNKALPAPIEKTISKAKGQPREPQVYTLPPSREEMTKNQVSLTC
LVKGFYPSDIAVEWESNGQPENNYKTTPPVLDSDGSFFLYSKLTVDKSRWQQGNVFSCSVMH
EALHNHYTQKSLSLSPGK
SEQ ID NO: 355 Fc33 (D265A, N297A)
ASTKGPSVFPLAPSSKSTSGGTAALGCLVKDYFPEPVTVSWNSGALTSGVHTFPAVLQSSGLY
SLSSVVTVPSSSLGTQTYICNVNHKPSNTKVDKKVEPKSCDKTHTCPPCPAPELLGGPSVFLFP
PKPKDTLMISRTPEVTCVVVAVSHEDPEVKFNWYVDGVEVHNAKTKPREEQYASTYRVVSV
LTVLHQDWLNGKEYKCKVSNKALPAPIEKTISKAKGQPREPQVYTLPPSREEMTKNQVSLTC
LVKGFYPSDIAVEWESNGQPENNYKTTPPVLDSDGSFFLYSKLTVDKSRWQQGNVFSCSVMH
EALHNHYTQKSLSLSPGK
SEQ ID NO: 356 Fc34 (D265A, N297G)
ASTKGPSVFPLAPSSKSTSGGTAALGCLVKDYFPEPVTVSWNSGALTSGVHTFPAVLQSSGLY
SLSSVVTVPSSSLGTQTYICNVNHKPSNTKVDKKVEPKSCDKTHTCPPCPAPELLGGPSVFLFP
PKPKDTLMISRTPEVTCVVVAVSHEDPEVKFNWYVDGVEVHNAKTKPREEQYGSTYRVVSV
LTVLHQDWLNGKEYKCKVSNKALPAPIEKTISKAKGQPREPQVYTLPPSRDELTKNQVSLTCL
VKGFYPSDIAVEWESNGQPENNYKTTPPVLDSDGSFFLYSKLTVDKSRWQQGNVFSCSVMHE
ALHNHYTQKSLSLSPGK
SEQ ID NO: 357 Fc35 (D265A, N297G)
ASTKGPSVFPLAPSSKSTSGGTAALGCLVKDYFPEPVTVSWNSGALTSGVHTFPAVLQSSGLY
SLSSVVTVPSSSLGTQTYICNVNHKPSNTKVDKRVEPKSCDKTHTCPPCPAPELLGGPSVFLFP
PKPKDTLMISRTPEVTCVVVAVSHEDPEVKFNWYVDGVEVHNAKTKPREEQYGSTYRVVSV
LTVLHQDWLNGKEYKCKVSNKALPAPIEKTISKAKGQPREPQVYTLPPSREEMTKNQVSLTC
LVKGFYPSDIAVEWESNGQPENNYKTTPPVLDSDGSFFLYSKLTVDKSRWQQGNVFSCSVMH
EALHNHYTQKSLSLSPGK
SEQ ID NO: 358 Fc36 (D265A, N297G)
ASTKGPSVFPLAPSSKSTSGGTAALGCLVKDYFPEPVTVSWNSGALTSGVHTFPAVLQSSGLY
SLSSVVTVPSSSLGTQTYICNVNHKPSNTKVDKKVEPKSCDKTHTCPPCPAPELLGGPSVFLFP
PKPKDTLMISRTPEVTCVVVAVSHEDPEVKFNWYVDGVEVHNAKTKPREEQYGSTYRVVSV
LTVLHQDWLNGKEYKCKVSNKALPAPIEKTISKAKGQPREPQVYTLPPSREEMTKNQVSLTC
LVKGFYPSDIAVEWESNGQPENNYKTTPPVLDSDGSFFLYSKLTVDKSRWQQGNVFSCSVMH
EALHNHYTQKSLSLSPGK
SEQ ID NO: 359 Fc37 (L235A, G237A)
ASTKGPSVFPLAPSSKSTSGGTAALGCLVKDYFPEPVTVSWNSGALTSGVHTFPAVLQSSGLY
SLSSVVTVPSSSLGTQTYICNVNHKPSNTKVDKKVEPKSCDKTHTCPPCPAPELAGAPSVFLFP
PKPKDTLMISRTPEVTCVVVDVSHEDPEVKFNWYVDGVEVHNAKTKPREEQYNSTYRVVSV
LTVLHQDWLNGKEYKCKVSNKALPAPIEKTISKAKGQPREPQVYTLPPSRDELTKNQVSLTCL
VKGFYPSDIAVEWESNGQPENNYKTTPPVLDSDGSFFLYSKLTVDKSRWQQGNVFSCSVMHE
ALHNHYTQKSLSLSPGK
SEQ ID NO: 360 Fc38 (L235A, G237A)
ASTKGPSVFPLAPSSKSTSGGTAALGCLVKDYFPEPVTVSWNSGALTSGVHTFPAVLQSSGLY
SLSSVVTVPSSSLGTQTYICNVNHKPSNTKVDKRVEPKSCDKTHTCPPCPAPELAGAPSVFLFP
PKPKDTLMISRTPEVTCVVVDVSHEDPEVKFNWYVDGVEVHNAKTKPREEQYNSTYRVVSV
LTVLHQDWLNGKEYKCKVSNKALPAPIEKTISKAKGQPREPQVYTLPPSREEMTKNQVSLTC
LVKGFYPSDIAVEWESNGQPENNYKTTPPVLDSDGSFFLYSKLTVDKSRWQQGNVFSCSVMH
EALHNHYTQKSLSLSPGK
SEQ ID NO: 361 Fc39 (L235A, G237A)
ASTKGPSVFPLAPSSKSTSGGTAALGCLVKDYFPEPVTVSWNSGALTSGVHTFPAVLQSSGLY
SLSSVVTVPSSSLGTQTYICNVNHKPSNTKVDKKVEPKSCDKTHTCPPCPAPELAGAPSVFLFP
PKPKDTLMISRTPEVTCVVVDVSHEDPEVKFNWYVDGVEVHNAKTKPREEQYNSTYRVVSV
LTVLHQDWLNGKEYKCKVSNKALPAPIEKTISKAKGQPREPQVYTLPPSREEMTKNQVSLTC
LVKGFYPSDIAVEWESNGQPENNYKTTPPVLDSDGSFFLYSKLTVDKSRWQQGNVFSCSVMH
EALHNHYTQKSLSLSPGK
SEQ ID NO: 362 Fc40 (IgG4)
ASTKGPSVFPLAPCSRSTSESTAALGCLVKDYFPEPVTVSWNSGALTSGVHTFPAVLQSSGLYS
LSSVVTVPSSSLGTKTYTCNVDHKPSNTKVDKRVESKYGPPCPSCPAPEFLGGPSVFLFPPKPK
DTLMISRTPEVTCVVVDVSQEDPEVQFNWYVDGVEVHNAKTKPREEQFNSTYRVVSVLTVL
HQDWLNGKEYKCKVSNKGLPSSIEKTISKAKGQPREPQVYTLPPSQEEMTKNQVSLTCLVKG
FYPSDIAVEWESNGQPENNYKTTPPVLDSDGSFFLYSRLTVDKSRWQEGNVFSCSVMHEALH
NHYTQKSLSLSLGK
SEQ ID NO: 401 (L234A, L235A)
ASTKGPSVFPLAPSSKSTSGGTAALGCLVKDYFPEPVTVSWNSGALTSGVHTFPAVLQSSGLY
SLSSVVTVPSSSLGTQTYICNVNHKPSNTKVDKKVEPKSCDKTHTCPPCPAPEAAGGPSVFLFP
PKPKDTLMISRTPEVTCVVVDVSHEDPEVKFNWYVDGVEVHNAKTKPREEQYNSTYRVVSV
LTVLHQDWLNGKEYKCKVSNKALPAPIEKTISKAKGQPREPQVYTLPPSRDELTKNQVSLTCL
VKGFYPSDIAVEWESNGQPENNYKTTPPVLDSDGSFFLYSKLTVDKSRWQQGNVFSCSVMHE
ALHNHYTQKSLSLSPGK
SEQ ID NO: 402 (L235E)
ASTKGPSVFPLAPSSKSTSGGTAALGCLVKDYFPEPVTVSWNSGALTSGVHTFPAVLQSSGLY
SLSSVVTVPSSSLGTQTYICNVNHKPSNTKVDKKVEPKSCDKTHTCPPCPAPELEGGPSVFLFP
PKPKDTLMISRTPEVTCVVVDVSHEDPEVKFNWYVDGVEVHNAKTKPREEQYNSTYRVVSV
LTVLHQDWLNGKEYKCKVSNKALPAPIEKTISKAKGQPREPQVYTLPPSRDELTKNQVSLTCL
VKGFYPSDIAVEWESNGQPENNYKTTPPVLDSDGSFFLYSKLTVDKSRWQQGNVFSCSVMHE
ALHNHYTQKSLSLSPGK
SEQ ID NO: 403 (L234A, L235A, G237A)
ASTKGPSVFPLAPSSKSTSGGTAALGCLVKDYFPEPVTVSWNSGALTSGVHTFPAVLQSSGLY
SLSSVVTVPSSSLGTQTYICNVNHKPSNTKVDKKVEPKSCDKTHTCPPCPAPEAAGAPSVFLFP
PKPKDTLMISRTPEVTCVVVDVSHEDPEVKFNWYVDGVEVHNAKTKPREEQYNSTYRVVSV
LTVLHQDWLNGKEYKCKVSNKALPAPIEKTISKAKGQPREPQVYTLPPSRDELTKNQVSLTCL
VKGFYPSDIAVEWESNGQPENNYKTTPPVLDSDGSFFLYSKLTVDKSRWQQGNVFSCSVMHE
ALHNHYTQKSLSLSPGK
SEQ ID NO: 404 (L234A, L235E, G237A)
ASTKGPSVFPLAPSSKSTSGGTAALGCLVKDYFPEPVTVSWNSGALTSGVHTFPAVLQSSGLY
SLSSVVTVPSSSLGTQTYICNVNHKPSNTKVDKKVEPKSCDKTHTCPPCPAPEAEGAPSVFLFP
PKPKDTLMISRTPEVTCVVVDVSHEDPEVKFNWYVDGVEVHNAKTKPREEQYNSTYRVVSV
LTVLHQDWLNGKEYKCKVSNKALPAPIEKTISKAKGQPREPQVYTLPPSRDELTKNQVSLTCL
VKGFYPSDIAVEWESNGQPENNYKTTPPVLDSDGSFFLYSKLTVDKSRWQQGNVFSCSVMHE
ALHNHYTQKSLSLSPGK
SEQ ID NO: 405 (L234A, L235A, P329A)
ASTKGPSVFPLAPSSKSTSGGTAALGCLVKDYFPEPVTVSWNSGALTSGVHTFPAVLQSSGLY
SLSSVVTVPSSSLGTQTYICNVNHKPSNTKVDKKVEPKSCDKTHTCPPCPAPEAAGGPSVFLFP
PKPKDTLMISRTPEVTCVVVDVSHEDPEVKFNWYVDGVEVHNAKTKPREEQYNSTYRVVSV
LTVLHQDWLNGKEYKCKVSNKALAAPIEKTISKAKGQPREPQVYTLPPSRDELTKNQVSLTC
LVKGFYPSDIAVEWESNGQPENNYKTTPPVLDSDGSFFLYSKLTVDKSRWQQGNVFSCSVMH
EALHNHYTQKSLSLSPGK
SEQ ID NO: 406 (L234A, L235A, P329G)
ASTKGPSVFPLAPSSKSTSGGTAALGCLVKDYFPEPVTVSWNSGALTSGVHTFPAVLQSSGLY
SLSSVVTVPSSSLGTQTYICNVNHKPSNTKVDKKVEPKSCDKTHTCPPCPAPEAAGGPSVFLFP
PKPKDTLMISRTPEVTCVVVDVSHEDPEVKFNWYVDGVEVHNAKTKPREEQYNSTYRVVSV
LTVLHQDWLNGKEYKCKVSNKALAAPIEKTISKAKGQPREPQVYTLPPSRDELTKNQVSLTC
LVKGFYPSDIAVEWESNGQPENNYKTTPPVLDSDGSFFLYSKLTVDKSRWQQGNVFSCSVMH
EALHNHYTQKSLSLSPGK
SEQ ID NO: 407 (P329A)
ASTKGPSVFPLAPSSKSTSGGTAALGCLVKDYFPEPVTVSWNSGALTSGVHTFPAVLQSSGLY
SLSSVVTVPSSSLGTQTYICNVNHKPSNTKVDKKVEPKSCDKTHTCPPCPAPEAAGGPSVFLFP
PKPKDTLMISRTPEVTCVVVDVSHEDPEVKFNWYVDGVEVHNAKTKPREEQYNSTYRVVSV
LTVLHQDWLNGKEYKCKVSNKALAAPIEKTISKAKGQPREPQVYTLPPSRDELTKNQVSLTC
LVKGFYPSDIAVEWESNGQPENNYKTTPPVLDSDGSFFLYSKLTVDKSRWQQGNVFSCSVMH
EALHNHYTQKSLSLSPGK
SEQ ID NO: 408 (L234E, L235F, P331S)
ASTKGPSVFPLAPSSKSTSGGTAALGCLVKDYFPEPVTVSWNSGALTSGVHTFPAVLQSSGLY
SLSSVVTVPSSSLGTQTYICNVNHKPSNTKVDKKVEPKSCDKTHTCPPCPAPEEFGGPSVFLFP
PKPKDTLMISRTPEVTCVVVDVSHEDPEVKFNWYVDGVEVHNAKTKPREEQYNSTYRVVSV
LTVLHQDWLNGKEYKCKVSNKALPASIEKTISKAKGQPREPQVYTLPPSRDELTKNQVSLTCL
VKGFYPSDIAVEWESNGQPENNYKTTPPVLDSDGSFFLYSKLTVDKSRWQQGNVFSCSVMHE
ALHNHYTQKSLSLSPGK
SEQ ID NO: 409 (D265A, N297G)
ASTKGPSVFPLAPSSKSTSGGTAALGCLVKDYFPEPVTVSWNSGALTSGVHTFPAVLQSSGLY
SLSSVVTVPSSSLGTQTYICNVNHKPSNTKVDKKVEPKSCDKTHTCPPCPAPELLGGPSVFLFP
PKPKDTLMISRTPEVTCVVVAVSHEDPEVKFNWYVDGVEVHNAKTKPREEQYGSTYRVVSV
LTVLHQDWLNGKEYKCKVSNKALPAPIEKTISKAKGQPREPQVYTLPPSRDELTKNQVSLTCL
VKGFYPSDIAVEWESNGQPENNYKTTPPVLDSDGSFFLYSKLTVDKSRWQQGNVFSCSVMHE
ALHNHYTQKSLSLSPGK
SEQ ID NO: 410 (N297G)
ASTKGPSVFPLAPSSKSTSGGTAALGCLVKDYFPEPVTVSWNSGALTSGVHTFPAVLQSSGLY
SLSSVVTVPSSSLGTQTYICNVNHKPSNTKVDKKVEPKSCDKTHTCPPCPAPELLGGPSVFLFP
PKPKDTLMISRTPEVTCVVVDVSHEDPEVKFNWYVDGVEVHNAKTKPREEQYGSTYRVVSV
LTVLHQDWLNGKEYKCKVSNKALPAPIEKTISKAKGQPREPQVYTLPPSRDELTKNQVSLTCL
VKGFYPSDIAVEWESNGQPENNYKTTPPVLDSDGSFFLYSKLTVDKSRWQQGNVFSCSVMHE
ALHNHYTQKSLSLSPGK
SEQ ID NO: 411 (S228P)
ASTKGPSVFPLAPCSRSTSESTAALGCLVKDYFPEPVTVSWNSGALTSGVHTFPAVLQSSGLYS
LSSVVTVPSSSLGTKTYTCNVDHKPSNTKVDKRVESKYGPPCPPCPAPEFLGGPSVFLFPPKPK
DTLMISRTPEVTCVVVDVSQEDPEVQFNWYVDGVEVHNAKTKPREEQFNSTYRVVSVLTVL
HQDWLNGKEYKCKVSNKGLPSSIEKTISKAKGQPREPQVYTLPPSQEEMTKNQVSLTCLVKG
FYPSDIAVEWESNGQPENNYKTTPPVLDSDGSFFLYSRLTVDKSRWQEGNVFSCSVMHEALH
NHYTQKSLSLSLGK
SEQ ID NO: 412 (S228P, L235E)
ASTKGPSVFPLAPCSRSTSESTAALGCLVKDYFPEPVTVSWNSGALTSGVHTFPAVLQSSGLYS
LSSVVTVPSSSLGTKTYTCNVDHKPSNTKVDKRVESKYGPPCPPCPAPEFEGGPSVFLFPPKPK
DTLMISRTPEVTCVVVDVSQEDPEVQFNWYVDGVEVHNAKTKPREEQFNSTYRVVSVLTVL
HQDWLNGKEYKCKVSNKGLPSSIEKTISKAKGQPREPQVYTLPPSQEEMTKNQVSLTCLVKG
FYPSDIAVEWESNGQPENNYKTTPPVLDSDGSFFLYSRLTVDKSRWQEGNVFSCSVMHEALH
NHYTQKSLSLSLGK
SEQ ID NO: 413 (S228P, F234A, L235A)
ASTKGPSVFPLAPCSRSTSESTAALGCLVKDYFPEPVTVSWNSGALTSGVHTFPAVLQSSGLYS
LSSVVTVPSSSLGTKTYTCNVDHKPSNTKVDKRVESKYGPPCPPCPAPEAAGGPSVFLFPPKPK
DTLMISRTPEVTCVVVDVSQEDPEVQFNWYVDGVEVHNAKTKPREEQFNSTYRVVSVLTVL
HQDWLNGKEYKCKVSNKGLPSSIEKTISKAKGQPREPQVYTLPPSQEEMTKNQVSLTCLVKG
FYPSDIAVEWESNGQPENNYKTTPPVLDSDGSFFLYSRLTVDKSRWQEGNVFSCSVMHEALH
NHYTQKSLSLSLGK
SEQ ID NO: 501 (L234A, L235A)
QVQLVQSGAEVKKPGASVKVSCKASGFDIQDTYMHWVKQRPGQGLEWMGRIDPASGHTKY
DPKFQVRVTITRDTSTSTVYLELSSLRSEDTAVYYCARSGGLPDVWGQGTTVTVSSASTKGPS
VFPLAPSSKSTSGGTAALGCLVKDYFPEPVTVSWNSGALTSGVHTFPAVLQSSGLYSLSSVVT
VPSSSLGTQTYICNVNHKPSNTKVDKKVEPKSCDKTHTCPPCPAPEAAGGPSVFLFPPKPKDTL
MISRTPEVTCVVVDVSHEDPEVKFNWYVDGVEVHNAKTKPREEQYNSTYRVVSVLTVLHQD
WLNGKEYKCKVSNKALPAPIEKTISKAKGQPREPQVYTLPPSRDELTKNQVSLTCLVKGFYPS
DIAVEWESNGQPENNYKTTPPVLDSDGSFFLYSKLTVDKSRWQQGNVFSCSVMHEALHNHY
TQKSLSLSPGK
SEQ ID NO: 502 (L235E)
QVQLVQSGAEVKKPGASVKVSCKASGFDIQDTYMHWVKQRPGQGLEWMGRIDPASGHTKY
DPKFQVRVTITRDTSTSTVYLELSSLRSEDTAVYYCARSGGLPDVWGQGTTVTVSSASTKGPS
VFPLAPSSKSTSGGTAALGCLVKDYFPEPVTVSWNSGALTSGVHTFPAVLQSSGLYSLSSVVT
VPSSSLGTQTYICNVNHKPSNTKVDKKVEPKSCDKTHTCPPCPAPELEGGPSVFLFPPKPKDTL
MISRTPEVTCVVVDVSHEDPEVKFNWYVDGVEVHNAKTKPREEQYNSTYRVVSVLTVLHQD
WLNGKEYKCKVSNKALPAPIEKTISKAKGQPREPQVYTLPPSRDELTKNQVSLTCLVKGFYPS
DIAVEWESNGQPENNYKTTPPVLDSDGSFFLYSKLTVDKSRWQQGNVFSCSVMHEALHNHY
TQKSLSLSPGK
SEQ ID NO: 503 (L234A, L235A, G237A)
QVQLVQSGAEVKKPGASVKVSCKASGFDIQDTYMHWVKQRPGQGLEWMGRIDPASGHTKY
DPKFQVRVTITRDTSTSTVYLELSSLRSEDTAVYYCARSGGLPDVWGQGTTVTVSSASTKGPS
VFPLAPSSKSTSGGTAALGCLVKDYFPEPVTVSWNSGALTSGVHTFPAVLQSSGLYSLSSVVT
VPSSSLGTQTYICNVNHKPSNTKVDKKVEPKSCDKTHTCPPCPAPEAAGAPSVFLFPPKPKDTL
MISRTPEVTCVVVDVSHEDPEVKFNWYVDGVEVHNAKTKPREEQYNSTYRVVSVLTVLHQD
WLNGKEYKCKVSNKALPAPIEKTISKAKGQPREPQVYTLPPSRDELTKNQVSLTCLVKGFYPS
DIAVEWESNGQPENNYKTTPPVLDSDGSFFLYSKLTVDKSRWQQGNVFSCSVMHEALHNHY
TQKSLSLSPGK
SEQ ID NO: 504 (L234A, L235E, G237A)
QVQLVQSGAEVKKPGASVKVSCKASGFDIQDTYMHWVKQRPGQGLEWMGRIDPASGHTKY
DPKFQVRVTITRDTSTSTVYLELSSLRSEDTAVYYCARSGGLPDVWGQGTTVTVSSASTKGPS
VFPLAPSSKSTSGGTAALGCLVKDYFPEPVTVSWNSGALTSGVHTFPAVLQSSGLYSLSSVVT
VPSSSLGTQTYICNVNHKPSNTKVDKKVEPKSCDKTHTCPPCPAPEAEGAPSVFLFPPKPKDTL
MISRTPEVTCVVVDVSHEDPEVKFNWYVDGVEVHNAKTKPREEQYNSTYRVVSVLTVLHQD
WLNGKEYKCKVSNKALPAPIEKTISKAKGQPREPQVYTLPPSRDELTKNQVSLTCLVKGFYPS
DIAVEWESNGQPENNYKTTPPVLDSDGSFFLYSKLTVDKSRWQQGNVFSCSVMHEALHNHY
TQKSLSLSPGK
SEQ ID NO: 505 (L234A, L235A, P329A)
QVQLVQSGAEVKKPGASVKVSCKASGFDIQDTYMHWVKQRPGQGLEWMGRIDPASGHTKY
DPKFQVRVTITRDTSTSTVYLELSSLRSEDTAVYYCARSGGLPDVWGQGTTVTVSSASTKGPS
VFPLAPSSKSTSGGTAALGCLVKDYFPEPVTVSWNSGALTSGVHTFPAVLQSSGLYSLSSVVT
VPSSSLGTQTYICNVNHKPSNTKVDKKVEPKSCDKTHTCPPCPAPEAAGGPSVFLFPPKPKDTL
MISRTPEVTCVVVDVSHEDPEVKFNWYVDGVEVHNAKTKPREEQYNSTYRVVSVLTVLHQD
WLNGKEYKCKVSNKALAAPIEKTISKAKGQPREPQVYTLPPSRDELTKNQVSLTCLVKGFYPS
DIAVEWESNGQPENNYKTTPPVLDSDGSFFLYSKLTVDKSRWQQGNVFSCSVMHEALHNHY
TQKSLSLSPGK
SEQ ID NO: 506 (L234A, L235A, P329G)
QVQLVQSGAEVKKPGASVKVSCKASGFDIQDTYMHWVKQRPGQGLEWMGRIDPASGHTKY
DPKFQVRVTITRDTSTSTVYLELSSLRSEDTAVYYCARSGGLPDVWGQGTTVTVSSASTKGPS
VFPLAPSSKSTSGGTAALGCLVKDYFPEPVTVSWNSGALTSGVHTFPAVLQSSGLYSLSSVVT
VPSSSLGTQTYICNVNHKPSNTKVDKKVEPKSCDKTHTCPPCPAPEAAGGPSVFLFPPKPKDTL
MISRTPEVTCVVVDVSHEDPEVKFNWYVDGVEVHNAKTKPREEQYNSTYRVVSVLTVLHQD
WLNGKEYKCKVSNKALAAPIEKTISKAKGQPREPQVYTLPPSRDELTKNQVSLTCLVKGFYPS
DIAVEWESNGQPENNYKTTPPVLDSDGSFFLYSKLTVDKSRWQQGNVFSCSVMHEALHNHY
TQKSLSLSPGK
SEQ ID NO: 507 (P329A)
QVQLVQSGAEVKKPGASVKVSCKASGFDIQDTYMHWVKQRPGQGLEWMGRIDPASGHTKY
DPKFQVRVTITRDTSTSTVYLELSSLRSEDTAVYYCARSGGLPDVWGQGTTVTVSSASTKGPS
VFPLAPSSKSTSGGTAALGCLVKDYFPEPVTVSWNSGALTSGVHTFPAVLQSSGLYSLSSVVT
VPSSSLGTQTYICNVNHKPSNTKVDKKVEPKSCDKTHTCPPCPAPEAAGGPSVFLFPPKPKDTL
MISRTPEVTCVVVDVSHEDPEVKFNWYVDGVEVHNAKTKPREEQYNSTYRVVSVLTVLHQD
WLNGKEYKCKVSNKALAAPIEKTISKAKGQPREPQVYTLPPSRDELTKNQVSLTCLVKGFYPS
DIAVEWESNGQPENNYKTTPPVLDSDGSFFLYSKLTVDKSRWQQGNVFSCSVMHEALHNHY
TQKSLSLSPGK
SEQ ID NO: 508 (L234E, L235F, P33 1S)
QVQLVQSGAEVKKPGASVKVSCKASGFDIQDTYMHWVKQRPGQGLEWMGRIDPASGHTKY
DPKFQVRVTITRDTSTSTVYLELSSLRSEDTAVYYCARSGGLPDVWGQGTTVTVSSASTKGPS
VFPLAPSSKSTSGGTAALGCLVKDYFPEPVTVSWNSGALTSGVHTFPAVLQSSGLYSLSSVVT
VPSSSLGTQTYICNVNHKPSNTKVDKKVEPKSCDKTHTCPPCPAPEEFGGPSVFLFPPKPKDTL
MISRTPEVTCVVVDVSHEDPEVKFNWYVDGVEVHNAKTKPREEQYNSTYRVVSVLTVLHQD
WLNGKEYKCKVSNKALPASIEKTISKAKGQPREPQVYTLPPSRDELTKNQVSLTCLVKGFYPS
DIAVEWESNGQPENNYKTTPPVLDSDGSFFLYSKLTVDKSRWQQGNVFSCSVMHEALHNHY
TQKSLSLSPGK
SEQ ID NO: 509 (D265A, N297G)
QVQLVQSGAEVKKPGASVKVSCKASGFDIQDTYMHWVKQRPGQGLEWMGRIDPASGHTKY
DPKFQVRVTITRDTSTSTVYLELSSLRSEDTAVYYCARSGGLPDVWGQGTTVTVSSASTKGPS
VFPLAPSSKSTSGGTAALGCLVKDYFPEPVTVSWNSGALTSGVHTFPAVLQSSGLYSLSSVVT
VPSSSLGTQTYICNVNHKPSNTKVDKKVEPKSCDKTHTCPPCPAPELLGGPSVFLFPPKPKDTL
MISRTPEVTCVVVAVSHEDPEVKFNWYVDGVEVHNAKTKPREEQYGSTYRVVSVLTVLHQD
WLNGKEYKCKVSNKALPAPIEKTISKAKGQPREPQVYTLPPSRDELTKNQVSLTCLVKGFYPS
DIAVEWESNGQPENNYKTTPPVLDSDGSFFLYSKLTVDKSRWQQGNVFSCSVMHEALHNHY
TQKSLSLSPGK
SEQ ID NO: 510 (N297G)
QVQLVQSGAEVKKPGASVKVSCKASGFDIQDTYMHWVKQRPGQGLEWMGRIDPASGHTKY
DPKFQVRVTITRDTSTSTVYLELSSLRSEDTAVYYCARSGGLPDVWGQGTTVTVSSASTKGPS
VFPLAPSSKSTSGGTAALGCLVKDYFPEPVTVSWNSGALTSGVHTFPAVLQSSGLYSLSSVVT
VPSSSLGTQTYICNVNHKPSNTKVDKKVEPKSCDKTHTCPPCPAPELLGGPSVFLFPPKPKDTL
MISRTPEVTCVVVDVSHEDPEVKFNWYVDGVEVHNAKTKPREEQYGSTYRVVSVLTVLHQD
WLNGKEYKCKVSNKALPAPIEKTISKAKGQPREPQVYTLPPSRDELTKNQVSLTCLVKGFYPS
DIAVEWESNGQPENNYKTTPPVLDSDGSFFLYSKLTVDKSRWQQGNVFSCSVMHEALHNHY
TQKSLSLSPGK
SEQ ID NO: 511 (S228P)
QVQLVQSGAEVKKPGASVKVSCKASGFDIQDTYMHWVKQRPGQGLEWMGRIDPASGHTKY
DPKFQVRVTITRDTSTSTVYLELSSLRSEDTAVYYCARSGGLPDVWGQGTTVTVSSASTKGPS
VFPLAPCSRSTSESTAALGCLVKDYFPEPVTVSWNSGALTSGVHTFPAVLQSSGLYSLSSVVTV
PSSSLGTKTYTCNVDHKPSNTKVDKRVESKYGPPCPPCPAPEFLGGPSVFLFPPKPKDTLMISR
TPEVTCVVVDVSQEDPEVQFNWYVDGVEVHNAKTKPREEQFNSTYRVVSVLTVLHQDWLN
GKEYKCKVSNKGLPSSIEKTISKAKGQPREPQVYTLPPSQEEMTKNQVSLTCLVKGFYPSDIAV
EWESNGQPENNYKTTPPVLDSDGSFFLYSRLTVDKSRWQEGNVFSCSVMHEALHNHYTQKS
LSLSLGK
SEQ ID NO: 512 (S228P, L235E)
QVQLVQSGAEVKKPGASVKVSCKASGFDIQDTYMHWVKQRPGQGLEWMGRIDPASGHTKY
DPKFQVRVTITRDTSTSTVYLELSSLRSEDTAVYYCARSGGLPDVWGQGTTVTVSSASTKGPS
VFPLAPCSRSTSESTAALGCLVKDYFPEPVTVSWNSGALTSGVHTFPAVLQSSGLYSLSSVVTV
PSSSLGTKTYTCNVDHKPSNTKVDKRVESKYGPPCPPCPAPEFEGGPSVFLFPPKPKDTLMISR
TPEVTCVVVDVSQEDPEVQFNWYVDGVEVHNAKTKPREEQFNSTYRVVSVLTVLHQDWLN
GKEYKCKVSNKGLPSSIEKTISKAKGQPREPQVYTLPPSQEEMTKNQVSLTCLVKGFYPSDIAV
EWESNGQPENNYKTTPPVLDSDGSFFLYSRLTVDKSRWQEGNVFSCSVMHEALHNHYTQKS
LSLSLGK
SEQ ID NO: 513 (S228P, F234A, L235A)
QVQLVQSGAEVKKPGASVKVSCKASGFDIQDTYMHWVKQRPGQGLEWMGRIDPASGHTKY
DPKFQVRVTITRDTSTSTVYLELSSLRSEDTAVYYCARSGGLPDVWGQGTTVTVSSASTKGPS
VFPLAPCSRSTSESTAALGCLVKDYFPEPVTVSWNSGALTSGVHTFPAVLQSSGLYSLSSVVTV
PSSSLGTKTYTCNVDHKPSNTKVDKRVESKYGPPCPPCPAPEAAGGPSVFLFPPKPKDTLMISR
TPEVTCVVVDVSQEDPEVQFNWYVDGVEVHNAKTKPREEQFNSTYRVVSVLTVLHQDWLN
GKEYKCKVSNKGLPSSIEKTISKAKGQPREPQVYTLPPSQEEMTKNQVSLTCLVKGFYPSDIAV
EWESNGQPENNYKTTPPVLDSDGSFFLYSRLTVDKSRWQEGNVFSCSVMHEALHNHYTQKS
LSLSLGK
SEQ ID NO: 514
EIVLTQSPGTLSLSPGERATLSCRASSSVSYMYWYQQKPGQAPRPLIYATSNLASGIPDRFSGS
GSGTDFTLTISRLEPEDFAVYYCQQWEGNPRTFGGGTKLEIKRTVAAPSVFIFPPSDEQLKSGT
ASVVCLLNNFYPREAKVQWKVDNALQSGNSQESVTEQDSKDSTYSLSSTLTLSKADYEKHK
VYACEVTHQGLSSPVTKSFNRGEC
SEQ ID NO: 515 G2 constant domain
ASTKGPSVFPLAPCSRSTSESTAALGCLVKDYFPEPVTVSWNSGALTSGVHTFPAVLQSSGLYS
LSSVVTVPSSNFGTQTYTCNVDHKPSNTKVDKTVERKCCVECPPCPAPPVAGPSVFLFPPKPK
DTLMISRTPEVTCVVVDVSHEDPEVQFNWYVDGVEVHNAKTKPREEQFNSTFRVVSVLTVV
HQDWLNGKEYKCKVSNKGLPAPIEKTISKTKGQPREPQVYTLPPSREEMTKNQVSLTCLVKG
FYPSDIAVEWESNGQPENNYKTTPPMLDSDGSFFLYSKLTVDKSRWQQGNVFSCSVMHEALH
NHYTQKSLSLSPGK

### Dosages and Routes of Administration

[0219] In general, methods disclosed herein comprise administering a therapeutic agent by oral administration. However, in some instances, methods comprise administering a therapeutic agent by intraperitoneal injection. In some instances, methods comprise administering a therapeutic agent in the form of an anal suppository. In some instances, methods comprise administering a therapeutic agent by intravenous (“i.v.”) administration. It is conceivable that one may also administer therapeutic agents disclosed herein by other routes, such as subcutaneous injection, intramuscular injection, intradermal injection, transdermal injection percutaneous administration, intranasal administration, intralymphatic injection, rectal administration intragastric administration, or any other suitable parenteral administration. In some embodiments, routes for local delivery closer to site of injury or inflammation are preferred over systemic routes. Routes, dosage, time points, and duration of administrating therapeutics may be adjusted. In some embodiments, administration of therapeutics is prior to, or after, onset of either, or both, acute and chronic symptoms of the disease or condition.

[0220] An effective dose and dosage of therapeutics to prevent or treat the disease or condition disclosed herein is defined by an observed beneficial response related to the disease or condition, or symptom of the disease or condition. Beneficial response comprises preventing, alleviating, arresting, or curing the disease or condition, or symptom of the disease or condition (e.g., reduced instances of diarrhea, rectal bleeding, weight loss, and size or number of intestinal lesions or strictures, reduced fibrosis or fibrogenesis, reduced fibrostenosis, reduced inflammation). In some embodiments, the beneficial response may be measured by detecting a measurable improvement in the presence, level, or activity, of biomarkers, transcriptomic risk profile, or intestinal microbiome in the subject. An “improvement,” as used herein refers to shift in the presence, level, or activity towards a presence, level, or activity, observed in normal individuals (e.g. individuals who do not suffer from the disease or condition). In instances wherein the therapeutic agent is not therapeutically effective or is not providing a sufficient alleviation of the disease or condition, or symptom of the disease or condition, then the dosage amount and/or route of administration may be changed, or an additional agent may be administered to the subject, along with the therapeutic agent. In some embodiments, as a patient is started on a regimen of a therapeutic agent, the patient is also weaned off (e.g., step-wise decrease in dose) a second treatment regimen.

[0221] Suitable dose and dosage administrated to a subject is determined by factors including, but no limited to, the particular therapeutic agent, disease condition and its severity, the identity (e.g., weight, sex, age) of the subject in need of treatment, and can be determined according to the particular circumstances surrounding the case, including, e.g., the specific agent being administered, the route of administration, the condition being treated, and the subject or host being treated. In general, however, doses employed for adult human treatment are typically in the range of 0.01 mg-5000 mg per day. In one aspect, doses employed for adult human treatment are from about 1 mg to about 1000 mg per day. In one embodiment, the desired dose is conveniently presented in a single dose or in divided doses administered simultaneously (or over a short period of time) or at appropriate intervals, for example as two, three, four or more sub-doses per day. Non-limiting examples of effective dosages of for oral delivery of a therapeutic agent include between about 0.1 mg/kg and about 100 mg/kg of body weight per day, and preferably between about 0.5 mg/kg and about 50 mg/kg of body weight per day. In other instances, the oral delivery dosage of effective amount is about 1 mg/kg and about 10 mg/kg of body weight per day of active material. Non-limiting examples of effective dosages for intravenous administration of the therapeutic agent include at a rate between about 0.01 to 100 pmol/kg body weight/min. In some embodiments, the daily dosage or the amount of active in the dosage form are lower or higher than the ranges indicated herein, based on a number of variables in regard to an individual treatment regime. In various embodiments, the daily and unit dosages are altered depending on a number of variables including, but not limited to, the activity of the therapeutic agent used, the disease or condition to be treated, the mode of administration, the requirements of the individual subject, the severity of the disease or condition being treated, and the judgment of the practitioner.

[0222] In some embodiments, the administration of the therapeutic agent is hourly, once every 2 hours, 3 hours, 4 hours, 5 hours, 6 hours, 7 hours, 8 hours, 9 hours, 10 hours, 11 hours, 12 hours, 13 hours, 14 hours, 15 hours, 16 hours, 17 hours, 18 hours, 19 hours, 20 hours, 21 hours 22 hours, 23 hours, 1 day, 2 days, 3 days, 4 days, 5 days, 6 days, 7 days, 8 days, 9 days, 10 days, 11 days, 12 days, 13 days, 14 days, 15 days, 1 month, 2 months, 3 months, 4 months, 5 months, 6 months, 7 months, 8 months, 9 months, 10 months, 11 months, 1 year, 2 years, 3 years, 4 years, or 5 years, or 10 years. The effective dosage ranges may be adjusted based on subject's response to the treatment. Some routes of administration will require higher concentrations of effective amount of therapeutics than other routes.

[0223] In certain embodiments wherein the patient's condition does not improve, upon the doctor's discretion the administration of therapeutic agent is administered chronically, that is, for an extended period of time, including throughout the duration of the patient's life in order to ameliorate or otherwise control or limit the symptoms of the patient's disease or condition. In certain embodiments wherein a patient's status does improve, the dose of therapeutic agent being administered may be temporarily reduced or temporarily suspended for a certain length of time (i.e., a “drug holiday”). In specific embodiments, the length of the drug holiday is between 2 days and 1 year, including by way of example only, 2 days, 3 days, 4 days, 5 days, 6 days, 7 days, 10 days, 12 days, 15 days, 20 days, 28 days, or more than 28 days. The dose reduction during a drug holiday is, by way of example only, by 10%-100%, including by way of example only 10%, 15%, 20%, 25%, 30%, 35%, 40%, 45%, 50%, 55%, 60%, 65%, 70%, 75%, 80%, 85%, 90%, 95%, and 100%. In certain embodiments, the dose of drug being administered may be temporarily reduced or temporarily suspended for a certain length of time (i.e., a “drug diversion”). In specific embodiments, the length of the drug diversion is between 2 days and 1 year, including by way of example only, 2 days, 3 days, 4 days, 5 days, 6 days, 7 days, 10 days, 12 days, 15 days, 20 days, 28 days, or more than 28 days. The dose reduction during a drug diversion is, by way of example only, by 10%-100%, including by way of example only 10%, 15%, 20%, 25%, 30%, 35%, 40%, 45%, 50%, 55%, 60%, 65%, 70%, 75%, 80%, 85%, 90%, 95%, and 100%. After a suitable length of time, the normal dosing schedule is optionally reinstated.

[0224] In some embodiments, once improvement of the patient's conditions has occurred, a maintenance dose is administered if necessary. Subsequently, in specific embodiments, the dosage or the frequency of administration, or both, is reduced, as a function of the symptoms, to a level at which the improved disease, disorder or condition is retained. In certain embodiments, however, the patient requires intermittent treatment on a long-term basis upon any recurrence of symptoms.

[0225] Toxicity and therapeutic efficacy of such therapeutic regimens are determined by standard pharmaceutical procedures in cell cultures or experimental animals, including, but not limited to, the determination of the LD50 and the ED50. The dose ratio between the toxic and therapeutic effects is the therapeutic index and it is expressed as the ratio between LD50 and ED50. In certain embodiments, the data obtained from cell culture assays and animal studies are used in formulating the therapeutically effective daily dosage range and/or the therapeutically effective unit dosage amount for use in mammals, including humans. In some embodiments, the daily dosage amount of the therapeutic agent described herein lies within a range of circulating concentrations that include the ED50 with minimal toxicity. In certain embodiments, the daily dosage range and/or the unit dosage amount varies within this range depending upon the dosage form employed and the route of administration utilized.

### Additional Therapeutic Agent

[0226] In some embodiments, a subject having, or suspected of having IBD and/or an EIM of IBD is treated with an additional therapeutic agent herein. In some embodiments, the additional therapeutic agent is used alone or in combination with another therapeutic agent. Therefore, “additional” does not limit the therapy to a therapy in addition to another therapy described herein, rather, an “additional” therapeutic agent may be used alone to treat the subject. The therapeutic agents may be administered together or sequentially. The combination therapies may be administered within the same day, or may be administered one or more days, weeks, months, or years apart. In some cases, a therapeutic agent provided herein is administered if the subject is determined to be non-responsive to a first line of therapy, e.g., such as TNF inhibitor. Such determination may be made by treatment with the first line therapy and monitoring of disease state and/or diagnostic determination that the subject would be non-responsive to the first line therapy.

[0227] In some embodiments, the additional therapeutic agent comprises an anti-TNF therapy, e.g., an anti-TNFα therapy. In some embodiments, the additional therapeutic agent comprises a second-line treatment to an anti-TNF therapy. In some embodiments, the additional therapeutic agent comprises an immunosuppressant, or a class of drugs that suppress, or reduce, the strength of the immune system. In some embodiments, the immunosuppressant is an antibody. Non-limiting examples of immunosuppressant therapeutic agents include STELARA® (ustekinumab) azathioprine (AZA), 6-mercaptopurine (6-MP), methotrexate, cyclosporin A. (CsA).

[0228] In some embodiments, the additional therapeutic agent comprises a selective anti-inflammatory drug, or a class of drugs that specifically target pro-inflammatory molecules in the body. In some embodiments, the anti-inflammatory drug comprises an antibody. In some embodiments, the anti-inflammatory drug comprises a small molecule. Non-limiting examples of anti-inflammatory drugs include ENTYVIO (vedolizumab), corticosteroids, aminosalicylates, mesalamine, balsalazide (Colazal) and olsalazine (Dipentum).

[0229] In some embodiments, the additional therapeutic agent comprises a stem cell therapy. The stem cell therapy may be embryonic or somatic stem cells. The stem cells may be isolated from a donor (allogeneic) or isolated from the subject (autologous). The stem cells may be expanded adipose-derived stem cells (eASCs), hematopoietic stem cells (HSCs), mesenchymal stem (stromal) cells (MSCs), or induced pluripotent stem cells (iPSCs) derived from the cells of the subject. In some embodiments, the therapeutic agent comprises Cx601/Alofisel® (darvadstrocel).

[0230] In some embodiments, the additional therapeutic agent comprises a small molecule. The small molecule may be used to treat inflammatory diseases or conditions, or fibrostenonic or fibrotic disease. Non-limiting examples of small molecules include Otezla® (apremilast), alicaforsen, or ozanimod (RPC-1063).

[0231] The additional therapeutic agent may comprise an antimycotic agent. In some instances, the antimycotic agent comprises an active agent that inhibits growth of a fungus. In some instances, the antimycotic agent comprises an active agent that kills a fungus. In some embodiments, the antimycotic agent comprises polyene, an azole, an echinocandin, an flucytosine, an allylamine, a tolnaftate, or griseofulvin, or a combination thereof. In other embodiments, the azole comprises triazole, imidazole, clotrimazole, ketoconazole, itraconazole, terconazole, oxiconazole, miconazole, econazole, tioconazole, voriconazole, fluconazole, isavuconazole, itraconazole, pramiconazole, ravuconazole, or posaconazole. In some other embodiments, the polyene comprises amphotericin B, nystatin, or natamycin. In yet other embodiments, the echinocandin comprises caspofungin, anidulafungin, or micafungin. In various other embodiments, the allylamine comprises naftifine or terbinafine.

[0232] The additional therapeutic agent may comprise an agonist or an antagonist of therapeutic target. Non-limiting therapeutic targets include Mitogen-Activated Protein Kinase 4 (MAP4K4), Prostaglandin E Receptor 4 (PTGER4), Interleukin 18 Receptor 1 (IL18R1), Interleukin 18 Receptor Accessory Protein (IL18RAP), Adenylate Cyclase 7 (ADCY7), B Lymphoid Tyrosine Kinase (BLK), G Protein-Coupled Receptor 65 (GPR65), Sprouty Related EVH1 Domain Containing 2 (SPRED2), and Src Kinase Associated Phosphoprotein 2 (SKAP2). Non-limiting examples of MAP4K4 modulators include GNE-220 and PF-6260933. Non-limiting examples of PTGER4 modulators include grapiprant (CJ-023,423), ONO-AE3-208, GW627368X, AH23848, ONO-AE2-227, ONO-AE1-734, AGN205203, rivenprost (ONO-4819), CJ-023,423, and BGC20-1531. Exemplary modulators of PFKFB3 include, but are not limited to 3-(3-pyridinyl)-1-(4-pyridinyl)-2-propen-1-one (3PO), 1-(4-pyridinyl)-3-(2-quinolinyl)-2-propen-1-one (PFK15), 5-triazolo-2-arylpyridazinone, 125 1-(3-pyridinyl)-3-(2-quinolinyl)-2-propen-1-one (PQP), 126 5, 6, 7, 8-tetrahydroxy-2-(4-hydroxyphenyl) chrome-4-one (N4A), and 7, 8-dihydroxy-3-(4-hydroxyphenyl) chromen-4-one (YN1). Non-limiting modulators of ADCY7 include forskolin and colforsin daropate. Non-limiting examples of GPR65 modulators include BTB09089 (3-[(2,4-dichlorophenyl)methylsulfanyl]-1,6-dimethylpyridazino[4,5-e][1,3,4]thiadiazin-5-one), and ZINC62678696.

[0233] In some embodiments, the therapeutic agent comprises an agonist of Janus Kinase 1 (JAK1). Non-limiting examples of JAK1 inhibitors include Ruxolitinib (INCB018424), S-Ruxolitinib (INCB018424), Baricitinib (LY3009104, INCB028050), Filgotinib (GLPG0634), Momelotinib (CYT387), Cerdulatinib (PRT062070, PRT2070), LY2784544, NVP-BSK805, 2HCl, Tofacitinib (CP-690550, Tasocitinib), XL019, Pacritinib (SB1518), or ZM 39923 HCl.

[0234] The therapeutic agent targeting the above genes or gene expression products may be an antibody or antigen binding fragment thereof. The therapeutic agent may be a small molecule. The therapeutic agent may be a peptide or a protein. The therapeutic agent may be an agonist, or partial agonist. The therapeutic agent may be an allosteric modulator, such as a positive allosteric modulator (PAM). The therapeutic agent may be an antagonist, or partial antagonist. The therapeutic agent may be an inverse agonist. The therapeutic agent may be a negative allosteric modulator (NAM).

[0235] Disclosed herein are additional therapeutic agents comprising a modulator of CD30 ligand (CD30L) (Entrez Gene ID: 943). In some embodiments, the modulator of CD30L is an agonist or an antagonist of CD30L. In some instances, the antagonist of CD30L is an inhibitor of CD30L. In some embodiments, an inhibitor of CD30L specifically binds directly or indirectly to CD30L, CD30, or a molecule that interferes directly or indirectly with binding between CD30L and CD30. In some embodiments, as used herein, an inhibitor of CD30L comprises an agent that modulates at least one functional activity of CD30L, such as binding to CD30. Non-limiting examples of inhibitors of CD30L include agents that specifically bind to CD30L, including a polypeptide such as an anti-CD30L antibody or antigen binding fragment thereof, and a nucleic acid, e.g., an antisense construct, siRNA, and ribozyme. An antisense construct includes an expression plasmid that when transcribed in the cell produces RNA complementary to a portion of mRNA encoding CD30L, and an oligonucleotide that inhibits protein expression by hybridizing with the CD30L mRNA. In some embodiments the inhibitor of CD30L comprises a non-polypeptide or non-nucleic acid portion as an active agent that binds to and inhibits CD30L activity.

[0236] In some embodiments, an inhibitor of CD30L is a polypeptide that binds to CD30L and/or CD30. In some cases, the polypeptide is a CD30 polypeptide or a portion thereof, wherein the portion retains the ability to bind to CD30L. A portion of a CD30 polypeptide includes at least about 10, 15, 20, 25, 30, 35, 40, 45, or 50 amino acids that have at least about 85%, 90%, or 95% identity to human CD30 having SEQ ID NO: 53, or SEQ ID NO: 54, or a sequence of any CD30 protein-coding isoform (for e.g., P28908). For example, an inhibitor of CD30L comprises a CD30 polypeptide that comprises all or part of the extracellular region of human CD30. In some embodiments, the CD30 polypeptide comprises amino acids 19-390 of SEQ ID NO: 2018 or a binding fragment thereof, having at least about 85%, 90%, or 95% sequence identity to CD30. In some embodiments, the CD30 polypeptide is a homologue of mammalian CD30, e.g., the CD30 polypeptide inhibitor of CD30L is a viral CD30 polypeptide or fragment thereof. As a non-limiting example, the viral CD30 polypeptide comprises viral CD30 from a poxvirus, such as ectromelia virus or cowpox virus.

[0237] In a non-limiting example, the inhibitor is an anti-CD30L antibody or an anti-CD30 antibody. As used herein, an antibody includes an antigen-binding fragment of a full length antibody, e.g., a Fab or scFv. In some embodiments, the antibody binds to the extracellular domain of CD30L. In some embodiments, an anti-CD30L antibody comprises a heavy chain comprising three complementarity-determining regions: HCDR1, HCDR2, and HCDR3; and a light chain comprising three complementarity-determining regions: LCDR1, LCDR2, and LCDR3. In some embodiments, the anti-CD30L antibody comprises a HCDR1 comprising SEQ ID NO: 20100, a HCDR2 comprising SEQ ID NO: 20101, a HCDR3 comprising SEQ ID NO: 20102, a LCDR1 comprising SEQ ID NO: 20103, a LCDR2 comprising SEQ ID NO: 20104, and a LCDR3 comprising SEQ ID NO: 20105.

[0238] In some embodiments, the anti-CD30L antibody comprises a HCDR1 comprising SEQ ID NO: 20106, a HCDR2 comprising SEQ ID NO: 20107, a HCDR3 comprising SEQ ID NO: 20108, a LCDR1 comprising SEQ ID NO: 20109, a LCDR2 comprising SEQ ID NO: 20110, and a LCDR3 comprising SEQ ID NO: 20111.

[0239] In some embodiments, the anti-CD30L antibody comprises a HCDR1 comprising SEQ ID NO: 20112, a HCDR2 comprising SEQ ID NO: 20113, a HCDR3 comprising SEQ ID NO: 20114, a LCDR1 comprising SEQ ID NO: 20115, a LCDR2 comprising SEQ ID NO: 20116, and a LCDR3 comprising SEQ ID NO: 20117.

[0240] In some embodiments, the anti-CD30L antibody comprises a HCDR1 comprising SEQ ID NO: 20118, a HCDR2 comprising SEQ ID NO: 20119, a HCDR3 comprising SEQ ID NO: 20120, a LCDR1 comprising SEQ ID NO: 20121, a LCDR2 comprising SEQ ID NO: 20122, and a LCDR3 comprising SEQ ID NO: 20123.

[0241] In some embodiments, the anti-CD30L antibody comprises a HCDR1 comprising SEQ ID NO: 20124, a HCDR2 comprising SEQ ID NO: 20125, a HCDR3 comprising SEQ ID NO: 20126, a LCDR1 comprising SEQ ID NO: 20127, a LCDR2 comprising SEQ ID NO: 20128, and a LCDR3 comprising SEQ ID NO: 20129.

[0242] In some embodiments, the anti-CD30L antibody comprises a HCDR1 comprising SEQ ID NO: 20130, a HCDR2 comprising SEQ ID NO: 20131, a HCDR3 comprising SEQ ID NO: 20132, a LCDR1 comprising SEQ ID NO: 20133, a LCDR2 comprising SEQ ID NO: 20134, and a LCDR3 comprising SEQ ID NO: 20135.

[0243] In some cases, the anti-CD30L antibody comprises a heavy chain (HC) variable domain comprising SEQ ID NO: 20136 and a light chain (LC) variable domain comprising SEQ ID NO: 20137. In some cases, the anti-CD30L antibody comprises a heavy chain (HC) variable domain comprising SEQ ID NO: 20138 and a light chain (LC) variable domain comprising SEQ ID NO: 20139. In some cases, the anti-CD30L antibody comprises a heavy chain (HC) variable domain comprising SEQ ID NO: 20140 and a light chain (LC) variable domain comprising SEQ ID NO: 20141. In some cases, the anti-CD30L antibody comprises a heavy chain (HC) variable domain comprising SEQ ID NO: 20142 and a light chain (LC) variable domain comprising SEQ ID NO: 20143. In some cases, the anti-CD30L antibody comprises a heavy chain (HC) variable domain comprising SEQ ID NO: 20144 and a light chain (LC) variable domain comprising SEQ ID NO: 20145. In some cases, the anti-CD30L antibody comprises a heavy chain (HC) variable domain comprising SEQ ID NO: 20146 and a light chain (LC) variable domain comprising SEQ ID NO: 20154. In some cases, the anti-CD30L antibody comprises a heavy chain (HC) variable domain comprising SEQ ID NO: 20147 and a light chain (LC) variable domain comprising SEQ ID NO: 20154. In some cases, the anti-CD30L antibody comprises a heavy chain (HC) variable domain comprising SEQ ID NO: 20148 and a light chain (LC) variable domain comprising SEQ ID NO: 20154. In some cases, the anti-CD30L antibody comprises a heavy chain (HC) variable domain comprising SEQ ID NO: 20149 and a light chain (LC) variable domain comprising SEQ ID NO: 20154. In some cases, the anti-CD30L antibody comprises a heavy chain (HC) variable domain comprising SEQ ID NO: 20150 and a light chain (LC) variable domain comprising SEQ ID NO: 20154. In some cases, the anti-CD30L antibody comprises a heavy chain (HC) variable domain comprising SEQ TD NO: 20151 and a light chain (LC) variable domain comprising SEQ ID NO: 20154. In some cases, the anti-CD30L antibody comprises a heavy chain (HC) variable domain comprising SEQ TD NO: 20152 and a light chain (LC) variable domain comprising SEQ ID NO: 20154. In some cases, the anti-CD30L antibody comprises a heavy chain (HC) variable domain comprising SEQ TD NO: 20153 and a light chain (LC) variable domain comprising SEQ ID NO: 20154.

[0244] In some embodiments, the anti-CD30 antibody comprises a heavy chain variable region comprising SEQ TD NO: 55 and a light chain variable region comprising SEQ TD NO: 56. Non-limiting examples of anti-CD30 antibodies include MDX-60, Ber-H2, SGN-30 (cAC10), Ki-4.dgA, 2RS-3/A9, AFM13, and H22xKi-4.

[0245] In some embodiments, the anti-CD30 antibody comprises an antibody drug conjugate. As a non-limiting example, the antibody drug conjugate is brentuximab, an anti-CD3 antibody conjugated to monomethyl auristatin E.

TABLE 3
Exemplary CD30 Ligand Antibodies

| Antibody | SEQ ID NO | Sequence |
|---|---|---|
| HCDR1 A1 | 20100 | SYIWS |
| HCDR2 A1 | 20101 | RIYASGNTNYNPSLKS |
| HCDR3 A1 | 20102 | DYRVAGTYYYYYGLDV |
| LCDR1 A1 | 20103 | TGTSSDVGVYDYVS |
| LCDR2 A1 | 20104 | EVSNRPS |
| LCDR3 A1 | 20105 | SSYTSRSTWV |
| HCDR1 A2 | 20106 | SYYWT |
| HCDR2 A2 | 20107 | RIYTSGITNYNPSLKS |
| HCDR3 A2 | 20108 | ERVVGASRYYYYGVDV |
| LCDR1 A2 | 20109 | TGTSSDVGLYNYVS |
| LCDR2 A2 | 20110 | EVNNRPS |
| LCDR3 A2 | 20111 | SSYTSSSTWV |
| HCDR1 A3 | 20112 | SYYWT |
| HCDR2 A3 | 20113 | RIYTSGITNYNPSLKS |
| HCDR3 A3 | 20114 | ERVVGASRYYYYGVDV |
| LCDR1 A3 | 20115 | TGTSSDIGLYDYVS |
| LCDR2 A3 | 20116 | EVNNRPS |
| LCDR3 A3 | 20117 | SSYTSSSTWV |
| HCDR1 A4 | 20118 | SYSWS |
| HCDR2 A4 | 20119 | RTSTSGRNNYNPSLKS |
| HCDR3 A4 | 20120 | DFTIAARRYYYYGMDV |
| LCDR1 A4 | 20121 | TGTSSDIGLYNYVS |
| LCDR2 A4 | 20122 | EVINRPS |
| LCDR3 A4 | 20123 | SSYTSSSTWV |
| HCDR1 A5 | 20124 | NNYWS |
| HCDR2 A5 | 20125 | RVYSSGLTNYKPSLKS |
| HCDR3 A5 | 20126 | ERATVTTRYHYDGMDV |
| LCDR1 A5 | 20127 | TGSSSDIGTYNYVS |
| LCDR2 A5 | 20128 | EVNNRPS |
| LCDR3 A5 | 20129 | SSYSSSSTWV |
| HCDR1 A6 | 20130 | SYYWS |
| HCDR2 A6 | 20131 | RIFASGSTNYNPSLRS |
| HCDR3 A6 | 20132 | ERVGVQDYYHYSGMDV |
| LCDR1 A6 | 20133 | TGTSSDVGLYNYVS |
| LCDR2 A6 | 20134 | EVSKRPS |
| LCDR3 A6 | 20135 | SSYTSSSTWV |
| HC Var 1 | 20136 | QVQLQESGPGLVKPSETLSLTCTVSGGSISSYYWTWIR |
| | | QPAGKGLEWIGRIYTSGITNYNPSLKSRVTMSVDTSKN |
| | | QFSLKLSSVTAADTAVYYCARERVVGASRYYYYGVD |
| | | VWGQGTTVTVSS |
| LC Var 1 | 20137 | QSALTQPASVSGSPGQSITISCTGTSSDVGLYNYVSWY |
| | | QQHPDKAPKLMIFEVNNRPSGVSNRFSGSNSGNTASL |
| | | TISGLQAEDEADYYCSSYTSSSTWVFGGGTKLTVL |
| HC Var 2 | 20138 | QVQLQESGPGLVKPSETLSLTCTVSGGSISSYYWTWIR |
| | | QPAGKGLEWIGRIYTSGITNYNPSLKSRVTMSVDTSKN |
| | | QFSLKLSSVTAADTAVYYCARERVVGASRYYYYGVD |
| | | VWGQGTTVTVSS |
| LC Var 2 | 20139 | QSALTQPASVSGSPGQSITISCTGTSSDIGLYDYVSWYQ |
| | | QHPDRAPKLIIFEVNNRPSGVSYRFSGSNSGNTASLTIS |
| | | GLQAEDEADYYCSSYTSSSTWVFGGGTKLTVL |
| HC Var 3 | 20140 | QVQLQESGPGLVKPSETLSLTCTVSGGSISSYSWSWIR |
| | | QPAGKGLEWIGRTSTSGRNNYNPSLKSRVTMSVDTSK |
| | | NQFSLKLNSVTAADTAVYYCARDFTIAARRYYYYGM |
| | | DVWGQGTTVTVSS |
| LC Var 3 | 20141 | QSALTQPASVSGSPGQSITISCTGTSSDIGLYNYVSWYQ |
| | | QHPGKAPKLIIYEVINRPSGVSNRFSGSESGNTASLTIS |
| | | GLQAEDEANYYCSSYTSSSTWVFGGGTKLTVL |
| HC Var 4 | 20142 | QVQLQESGPRLVKPSETLSLTCTVSGGSITNNYWSWIR |
| | | QPAGKGLEWIGRVYSSGLTNYKPSLKSRVTMSVDTSK |
| | | NQFSLRLNSVTAADTAVYYCARERATVTTRYHYDGM |
| | | DVWGQGTSVTVSS |
| LC Var 4 | 20143 | QSALTQPASVSGSPGQSITISCTGSSSDIGTYNYVSWYQ |
| | | QYPGKAPELMIYEVNNRPSGVSDRFSGSTSGNTASLTI |
| | | SGLQANDEADYYCSSYSSSSTWVFGGGTKLTVL |
| HC Var 5 | 20144 | QVQLQESGPGLVKPSETLSLTCTVSGGSISSYYWSWIR |
| | | QPAGKGLEWIGRIFASGSTNYNPSLRSRVTMSRDTSKN |
| | | QFSLKLSSVTAADTAVYYCAKERVGVQDYYHYSGMD |
| | | VWGQGTTVTVSS |
| LC Var 5 | 20145 | QSALTQPASVSGSPGQSITISCTGTSSDVGLYNYVSWY |
| | | QQQPGKAPKLMIYEVSKRPSGVSNRFSGSTSGNTASLT |
| | | ISGLQADDEADYSCSSYTSSSTWVFGGGTKLTVL |
| HC Var 6 | 20146 | QVQLQESGPGLVKPSETLSLTCTVSGGSISSYIWSWIRQ |
| | | PAGKGLEWIGRIYASGNTNYNPSLKSRVTISVDTSKNQ |
| | | FSLKLSSMTAADTAVYYCARDYRVAGTYYYYYGLDV |
| | | WGQGTTVTVSS |
| HC Var 7 | 20147 | QVQLQESGPGLVKPSETLSLTCTVSGGSISSYIWSWIRQ |
| | | PAGKGLEWIGRIYASGNTNYNPSLKSRVTMSVDTSKN |
| | | QFSLKLSSMTAADTAVYYCARDYRVAGTYYYYYGLD |
| | | VWGQGTTVTVSS |
| HC Var 8 | 20148 | QVQLQESGPGLVKPSETLSLTCTVSGGSISSYIWSWIRQ |
| | | PAGKGLEWIGRIYASGNTNYNPSLKSRVTMSVDTSKN |
| | | QFSLKLSSVTAADTAVYYCARDYRVAGTYYYYYGLD |
| | | VWGQGTTVTVSS |
| HC Var 9 | 20149 | QVQLQESGPGLVKPSETLSLTCTVSGGSISSYIWSWIRQ |
| | | PAGKGLEWIGRIYASGQTNYNPSLKSRVTMSVDTSKN |
| | | QFSLKLSSMTAADTAVYYCARDYRVAGTYYYYYGLD |
| | | VWGQGTTVTVSS |
| HC Var 10 | 20150 | QVQLQESGPGLVKPSETLSLTCTVSGGSISSYIWSWIRQ |
| | | PAGKGLEWIGRIYASGQTNYNPSLKSRVTISVDTSKNQ |
| | | FSLKLSSVTAADTAVYYCARDYRVAGTYYYYYGLDV |
| | | WGQGTTVTVSS |
| HC Var 11 | 20151 | QVQLQESGPGLVKPSETLSLTCTVSGGSISSYIWSWIRQ |
| | | PAGKGLEWIGRIYASGNTNYNPSLKSRVTISVDTSKNQ |
| | | FSLKLSSVTAADTAVYYCARDYRVAGTYYYYYGLDV |
| | | WGQGTTVTVSS |
| HC Var 12 | 20152 | QVQLQESGPGLVKPSETLSLTCTVSGGSISSYIWSWIRQ |
| | | PAGKGLEWIGRIYASGQTNYNPSLKSRVTISVDTSKNQ |
| | | FSLKLSSMTAADTAVYYCARDYRVAGTYYYYYGLDV |
| | | WGQGTTVTVSS |
| HC Var 13 | 20153 | QVQLQESGPGLVKPSETLSLTCTVSGGSISSYIWSWIRQ |
| | | PAGKGLEWIGRIYASGQTNYNPSLKSRVTMSVDTSKN |
| | | QFSLKLSSVTAADTAVYYCARDYRVAGTYYYYYGLD |
| | | VWGQGTTVTVSS |
| LC Var 6-13 | 20154 | QSALTQPASVSGSPGQSITISCTGTSSDVGVYDYVSWY |
| | | QQHPGKAPKLMIYEVSNRPSGVSNRFSGSKSGNTASL |
| | | TISGLQTEDEADYYCSSYTSRSTWVFGGGTKLTVL |

### Pharmaceutical Composition

[0246] A pharmaceutical composition, as used herein, refers to a mixture of a therapeutic agent, with other chemical components (i.e. pharmaceutically acceptable inactive ingredients), such as carriers, excipients, binders, filling agents, suspending agents, flavoring agents, sweetening agents, disintegrating agents, dispersing agents, surfactants, lubricants, colorants, diluents, solubilizers, moistening agents, plasticizers, stabilizers, penetration enhancers, wetting agents, anti-foaming agents, antioxidants, preservatives, or one or more combination thereof. Optionally, the compositions include two or more therapeutic agent (e.g., one or more therapeutic agents and one or more additional agents) as discussed herein. In practicing the methods of treatment or use provided herein, therapeutically effective amounts of therapeutic agents described herein are administered in a pharmaceutical composition to a mammal having a disease, disorder, or condition to be treated, e.g., an inflammatory disease, fibrostenotic disease, and/or fibrotic disease. In some embodiments, the mammal is a human. A therapeutically effective amount can vary widely depending on the severity of the disease, the age and relative health of the subject, the potency of the therapeutic agent used and other factors. The therapeutic agents can be used singly or in combination with one or more therapeutic agents as components of mixtures.

[0247] The pharmaceutical formulations described herein are administered to a subject by appropriate administration routes, including but not limited to, intravenous, intraarterial, oral, parenteral, buccal, topical, transdermal, rectal, intramuscular, subcutaneous, intraosseous, transmucosal, inhalation, or intraperitoneal administration routes. The pharmaceutical formulations described herein include, but are not limited to, aqueous liquid dispersions, self-emulsifying dispersions, solid solutions, liposomal dispersions, aerosols, solid dosage forms, powders, immediate release formulations, controlled release formulations, fast melt formulations, tablets, capsules, pills, delayed release formulations, extended release formulations, pulsatile release formulations, multiparticulate formulations, and mixed immediate and controlled release formulations.

[0248] Pharmaceutical compositions including a therapeutic agent are manufactured in a conventional manner, such as, by way of example only, by means of conventional mixing, dissolving, granulating, dragee-making, levigating, emulsifying, encapsulating, entrapping or compression processes.

[0249] The pharmaceutical compositions may include at least a therapeutic agent as an active ingredient in free-acid or free-base form, or in a pharmaceutically acceptable salt form. In addition, the methods and pharmaceutical compositions described herein include the use of N-oxides (if appropriate), crystalline forms, amorphous phases, as well as active metabolites of these compounds having the same type of activity. In some embodiments, therapeutic agents exist in unsolvated form or in solvated forms with pharmaceutically acceptable solvents such as water, ethanol, and the like. The solvated forms of the therapeutic agents are also considered to be disclosed herein.

[0250] In some embodiments, a therapeutic agent exists as a tautomer. All tautomers are included within the scope of the agents presented herein. As such, it is to be understood that a therapeutic agent or a salt thereof may exhibit the phenomenon of tautomerism whereby two chemical compounds that are capable of facile interconversion by exchanging a hydrogen atom between two atoms, to either of which it forms a covalent bond. Since the tautomeric compounds exist in mobile equilibrium with each other they may be regarded as different isomeric forms of the same compound.

[0251] In some embodiments, a therapeutic agent exists as an enantiomer, diastereomer, or other stereoisomeric form. The agents disclosed herein include all enantiomeric, diastereomeric, and epimeric forms as well as mixtures thereof.

[0252] In some embodiments, therapeutic agents described herein may be prepared as prodrugs. A “prodrug” refers to an agent that is converted into the parent drug in vivo. Prodrugs are often useful because, in some situations, they may be easier to administer than the parent drug. They may, for instance, be bioavailable by oral administration whereas the parent is not. The prodrug may also have improved solubility in pharmaceutical compositions over the parent drug. An example, without limitation, of a prodrug would be a therapeutic agent described herein, which is administered as an ester (the “prodrug”) to facilitate transmittal across a cell membrane where water solubility is detrimental to mobility but which then is metabolically hydrolyzed to the carboxylic acid, the active entity, once inside the cell where water-solubility is beneficial. A further example of a prodrug might be a short peptide (polyaminoacid) bonded to an acid group where the peptide is metabolized to reveal the active moiety. In certain embodiments, upon in vivo administration, a prodrug is chemically converted to the biologically, pharmaceutically or therapeutically active form of the therapeutic agent. In certain embodiments, a prodrug is enzymatically metabolized by one or more steps or processes to the biologically, pharmaceutically or therapeutically active form of the therapeutic agent.

[0253] Prodrug forms of the therapeutic agents, wherein the prodrug is metabolized in vivo to produce an agent as set forth herein are included within the scope of the claims. Prodrug forms of the herein described therapeutic agents, wherein the prodrug is metabolized in vivo to produce an agent as set forth herein are included within the scope of the claims. In some cases, some of the therapeutic agents described herein may be a prodrug for another derivative or active compound. In some embodiments described herein, hydrazones are metabolized in vivo to produce a therapeutic agent.

[0254] In certain embodiments, compositions provided herein include one or more preservatives to inhibit microbial activity. Suitable preservatives include mercury-containing substances such as merfen and thiomersal; stabilized chlorine dioxide; and quaternary ammonium compounds such as benzalkonium chloride, cetyltrimethylammonium bromide and cetylpyridinium chloride.

[0255] In some embodiments, formulations described herein benefit from antioxidants, metal chelating agents, thiol containing compounds and other general stabilizing agents. Examples of such stabilizing agents, include, but are not limited to: (a) about 0.5% to about 2% w/v glycerol, (b) about 0.1% to about 1% w/v methionine, (c) about 0.1% to about 2% w/v monothioglycerol, (d) about 1 mM to about 10 mM EDTA, (e) about 0.01% to about 2% w/v ascorbic acid, (f) 0.003% to about 0.02% w/v polysorbate 80, (g) 0.001% to about 0.05% w/v. polysorbate 20, (h) arginine, (i) heparin, (j) dextran sulfate, (k) cyclodextrins, (l) pentosan polysulfate and other heparinoids, (m) divalent cations such as magnesium and zinc; or (n) combinations thereof.

[0256] The pharmaceutical compositions described herein are formulated into any suitable dosage form, including but not limited to, aqueous oral dispersions, liquids, gels, syrups, elixirs, slurries, suspensions, solid oral dosage forms, aerosols, controlled release formulations, fast melt formulations, effervescent formulations, lyophilized formulations, tablets, powders, pills, dragees, capsules, delayed release formulations, extended release formulations, pulsatile release formulations, multiparticulate formulations, and mixed immediate release and controlled release formulations. In one aspect, a therapeutic agent as discussed herein, e.g., therapeutic agent is formulated into a pharmaceutical composition suitable for intramuscular, subcutaneous, or intravenous injection. In one aspect, formulations suitable for intramuscular, subcutaneous, or intravenous injection include physiologically acceptable sterile aqueous or non-aqueous solutions, dispersions, suspensions or emulsions, and sterile powders for reconstitution into sterile injectable solutions or dispersions. Examples of suitable aqueous and non-aqueous carriers, diluents, solvents, or vehicles include water, ethanol, polyols (propyleneglycol, polyethylene-glycol, glycerol, cremophor and the like), suitable mixtures thereof, vegetable oils (such as olive oil) and injectable organic esters such as ethyl oleate. Proper fluidity can be maintained, for example, by the use of a coating such as lecithin, by the maintenance of the required particle size in the case of dispersions, and by the use of surfactants. In some embodiments, formulations suitable for subcutaneous injection also contain additives such as preserving, wetting, emulsifying, and dispensing agents. Prevention of the growth of microorganisms can be ensured by various antibacterial and antifungal agents, such as parabens, chlorobutanol, phenol, sorbic acid, and the like. In some cases it is desirable to include isotonic agents, such as sugars, sodium chloride, and the like. Prolonged absorption of the injectable pharmaceutical form can be brought about by the use of agents delaying absorption, such as aluminum monostearate and gelatin.

[0257] For intravenous injections or drips or infusions, a therapeutic agent described herein is formulated in aqueous solutions, preferably in physiologically compatible buffers such as Hank's solution, Ringer's solution, or physiological saline buffer. For transmucosal administration, penetrants appropriate to the barrier to be permeated are used in the formulation. Such penetrants are generally known in the art. For other parenteral injections, appropriate formulations include aqueous or nonaqueous solutions, preferably with physiologically compatible buffers or excipients. Such excipients are known.

[0258] Parenteral injections may involve bolus injection or continuous infusion. Formulations for injection may be presented in unit dosage form, e.g., in ampoules or in multi dose containers, with an added preservative. The pharmaceutical composition described herein may be in a form suitable for parenteral injection as a sterile suspensions, solutions or emulsions in oily or aqueous vehicles, and may contain formulatory agents such as suspending, stabilizing and/or dispersing agents. In one aspect, the active ingredient is in powder form for constitution with a suitable vehicle, e.g., sterile pyrogen-free water, before use.

[0259] For administration by inhalation, a therapeutic agent is formulated for use as an aerosol, a mist or a powder. Pharmaceutical compositions described herein are conveniently delivered in the form of an aerosol spray presentation from pressurized packs or a nebulizer, with the use of a suitable propellant, e.g., dichlorodifluoromethane, trichlorofluoromethane, dichlorotetrafluoroethane, carbon dioxide or other suitable gas. In the case of a pressurized aerosol, the dosage unit may be determined by providing a valve to deliver a metered amount. Capsules and cartridges of, such as, by way of example only, gelatin for use in an inhaler or insufflator may be formulated containing a powder mix of the therapeutic agent described herein and a suitable powder base such as lactose or starch.

[0260] Representative intranasal formulations are described in, for example, U.S. Pat. Nos. 4,476,116, 5,116,817 and 6,391,452. Formulations that include a therapeutic agent are prepared as solutions in saline, employing benzyl alcohol or other suitable preservatives, fluorocarbons, and/or other solubilizing or dispersing agents known in the art. See, for example, Ansel, H. C. et al., Pharmaceutical Dosage Forms and Drug Delivery Systems, Sixth Ed. (1995). Preferably these compositions and formulations are prepared with suitable nontoxic pharmaceutically acceptable ingredients. These ingredients are known to those skilled in the preparation of nasal dosage forms and some of these can be found in REMINGTON: THE SCIENCE AND PRACTICE OF PHARMACY, 21st edition, 2005. The choice of suitable carriers is dependent upon the exact nature of the nasal dosage form desired, e.g., solutions, suspensions, ointments, or gels. Nasal dosage forms generally contain large amounts of water in addition to the active ingredient. Minor amounts of other ingredients such as pH adjusters, emulsifiers or dispersing agents, preservatives, surfactants, gelling agents, or buffering and other stabilizing and solubilizing agents are optionally present. Preferably, the nasal dosage form should be isotonic with nasal secretions.

[0261] Pharmaceutical preparations for oral use are obtained by mixing one or more solid excipient with one or more of the therapeutic agents described herein, optionally grinding the resulting mixture, and processing the mixture of granules, after adding suitable auxiliaries, if desired, to obtain tablets or dragee cores. Suitable excipients include, for example, fillers such as sugars, including lactose, sucrose, mannitol, or sorbitol; cellulose preparations such as, for example, maize starch, wheat starch, rice starch, potato starch, gelatin, gum tragacanth, methylcellulose, microcrystalline cellulose, hydroxypropylmethylcellulose, sodium carboxymethylcellulose; or others such as: polyvinylpyrrolidone (PVP or povidone) or calcium phosphate. If desired, disintegrating agents are added, such as the cross linked croscarmellose sodium, polyvinylpyrrolidone, agar, or alginic acid or a salt thereof such as sodium alginate. In some embodiments, dyestuffs or pigments are added to the tablets or dragee coatings for identification or to characterize different combinations of active therapeutic agent doses.

[0262] In some embodiments, pharmaceutical formulations of a therapeutic agent are in the form of a capsules, including push fit capsules made of gelatin, as well as soft, sealed capsules made of gelatin and a plasticizer, such as glycerol or sorbitol. The push fit capsules contain the active ingredients in admixture with filler such as lactose, binders such as starches, and/or lubricants such as talc or magnesium stearate and, optionally, stabilizers. In soft capsules, the active therapeutic agent is dissolved or suspended in suitable liquids, such as fatty oils, liquid paraffin, or liquid polyethylene glycols. In some embodiments, stabilizers are added. A capsule may be prepared, for example, by placing the bulk blend of the formulation of the therapeutic agent inside of a capsule. In some embodiments, the formulations (non-aqueous suspensions and solutions) are placed in a soft gelatin capsule. In other embodiments, the formulations are placed in standard gelatin capsules or non-gelatin capsules such as capsules comprising HPMC. In other embodiments, the formulation is placed in a sprinkle capsule, wherein the capsule is swallowed whole or the capsule is opened and the contents sprinkled on food prior to eating.

[0263] All formulations for oral administration are in dosages suitable for such administration. In one aspect, solid oral dosage forms are prepared by mixing a therapeutic agent with one or more of the following: antioxidants, flavoring agents, and carrier materials such as binders, suspending agents, disintegration agents, filling agents, surfactants, solubilizers, stabilizers, lubricants, wetting agents, and diluents. In some embodiments, the solid dosage forms disclosed herein are in the form of a tablet, (including a suspension tablet, a fast-melt tablet, a bite-disintegration tablet, a rapid-disintegration tablet, an effervescent tablet, or a caplet), a pill, a powder, a capsule, solid dispersion, solid solution, bioerodible dosage form, controlled release formulations, pulsatile release dosage forms, multiparticulate dosage forms, beads, pellets, granules. In other embodiments, the pharmaceutical formulation is in the form of a powder. Compressed tablets are solid dosage forms prepared by compacting the bulk blend of the formulations described above. In various embodiments, tablets will include one or more flavoring agents. In other embodiments, the tablets will include a film surrounding the final compressed tablet. In some embodiments, the film coating can provide a delayed release of a therapeutic agent from the formulation. In other embodiments, the film coating aids in patient compliance (e.g., Opadry® coatings or sugar coating). Film coatings including Opadry® typically range from about 1% to about 3% of the tablet weight. In some embodiments, solid dosage forms, e.g., tablets, effervescent tablets, and capsules, are prepared by mixing particles of a therapeutic agent with one or more pharmaceutical excipients to form a bulk blend composition. The bulk blend is readily subdivided into equally effective unit dosage forms, such as tablets, pills, and capsules. In some embodiments, the individual unit dosages include film coatings. These formulations are manufactured by conventional formulation techniques.

[0264] In another aspect, dosage forms include microencapsulated formulations. In some embodiments, one or more other compatible materials are present in the microencapsulation material. Exemplary materials include, but are not limited to, pH modifiers, erosion facilitators, anti-foaming agents, antioxidants, flavoring agents, and carrier materials such as binders, suspending agents, disintegration agents, filling agents, surfactants, solubilizers, stabilizers, lubricants, wetting agents, and diluents. Exemplary useful microencapsulation materials include, but are not limited to, hydroxypropyl cellulose ethers (HPC) such as Klucel® or Nisso HPC, low-substituted hydroxypropyl cellulose ethers (L-HPC), hydroxypropyl methyl cellulose ethers (HPMC) such as Seppifilm-LC, Pharmacoat®, Metolose SR, Methocel®-E, Opadry YS, PrimaFlo, Benecel MP824, and Benecel MP843, methylcellulose polymers such as Methocel®-A, hydroxypropylmethylcellulose acetate stearate Aqoat (HF-LS, IF-LG,HF-MS) and Metolose®, Ethylcelluloses (EC) and mixtures thereof such as E461, Ethocel®, Aqualon®-EC, Surelease®, Polyvinyl alcohol (PVA) such as Opadry AMB, hydroxyethylcelluloses such as Natrosol®, carboxymethylcelluloses and salts of carboxymethylcelluloses (CMC) such as Aqualon®-CMC, polyvinyl alcohol and polyethylene glycol co-polymers such as Kollicoat IR®, monoglycerides (Myverol), triglycerides (KLX), polyethylene glycols, modified food starch, acrylic polymers and mixtures of acrylic polymers with cellulose ethers such as Eudragit® EPO, Eudragit® L30D-55, Eudragit® FS 30D Eudragit® L100-55, Eudragit® L100, Eudragit® S100, Eudragit® RD100, Eudragit® E100, Eudragit® L12.5, Eudragit® S12.5, Eudragit® NE30D, and Eudragit® NE 40D, cellulose acetate phthalate, sepifilms such as mixtures of HPMC and stearic acid, cyclodextrins, and mixtures of these materials.

[0265] Liquid formulation dosage forms for oral administration are optionally aqueous suspensions selected from the group including, but not limited to, pharmaceutically acceptable aqueous oral dispersions, emulsions, solutions, elixirs, gels, and syrups. See, e.g., Singh et al., Encyclopedia of Pharmaceutical Technology, 2nd Ed., pp. 754-757 (2002). In addition to therapeutic agent the liquid dosage forms optionally include additives, such as: (a) disintegrating agents; (b) dispersing agents; (c) wetting agents; (d) at least one preservative, (e) viscosity enhancing agents, (f) at least one sweetening agent, and (g) at least one flavoring agent. In some embodiments, the aqueous dispersions further includes a crystal-forming inhibitor.

[0266] In some embodiments, the pharmaceutical formulations described herein are self-emulsifying drug delivery systems (SEDDS). Emulsions are dispersions of one immiscible phase in another, usually in the form of droplets. Generally, emulsions are created by vigorous mechanical dispersion. SEDDS, as opposed to emulsions or microemulsions, spontaneously form emulsions when added to an excess of water without any external mechanical dispersion or agitation. An advantage of SEDDS is that only gentle mixing is required to distribute the droplets throughout the solution. Additionally, water or the aqueous phase is optionally added just prior to administration, which ensures stability of an unstable or hydrophobic active ingredient. Thus, the SEDDS provides an effective delivery system for oral and parenteral delivery of hydrophobic active ingredients. In some embodiments, SEDDS provides improvements in the bioavailability of hydrophobic active ingredients. Methods of producing self-emulsifying dosage forms include, but are not limited to, for example, U.S. Pat. Nos. 5,858,401, 6,667,048, and 6,960,563.

[0267] Buccal formulations that include a therapeutic agent are administered using a variety of formulations known in the art. For example, such formulations include, but are not limited to, U.S. Pat. Nos. 4,229,447, 4,596,795, 4,755,386, and 5,739,136. In addition, the buccal dosage forms described herein can further include a bioerodible (hydrolysable) polymeric carrier that also serves to adhere the dosage form to the buccal mucosa. For buccal or sublingual administration, the compositions may take the form of tablets, lozenges, or gels formulated in a conventional manner.

[0268] For intravenous injections, a therapeutic agent is optionally formulated in aqueous solutions, preferably in physiologically compatible buffers such as Hank's solution, Ringer's solution, or physiological saline buffer. For transmucosal administration, penetrants appropriate to the barrier to be permeated are used in the formulation. For other parenteral injections, appropriate formulations include aqueous or nonaqueous solutions, preferably with physiologically compatible buffers or excipients.

[0269] Parenteral injections optionally involve bolus injection or continuous infusion. Formulations for injection are optionally presented in unit dosage form, e.g., in ampoules or in multi dose containers, with an added preservative. In some embodiments, a pharmaceutical composition described herein is in a form suitable for parenteral injection as a sterile suspensions, solutions or emulsions in oily or aqueous vehicles, and contain formulatory agents such as suspending, stabilizing and/or dispersing agents. Pharmaceutical formulations for parenteral administration include aqueous solutions of an agent that modulates the activity of a carotid body in water soluble form. Additionally, suspensions of an agent that modulates the activity of a carotid body are optionally prepared as appropriate, e.g., oily injection suspensions.

[0270] Conventional formulation techniques include, e.g., one or a combination of methods: (1) dry mixing, (2) direct compression, (3) milling, (4) dry or non-aqueous granulation, (5) wet granulation, or (6) fusion. Other methods include, e.g., spray drying, pan coating, melt granulation, granulation, fluidized bed spray drying or coating (e.g., wurster coating), tangential coating, top spraying, tableting, extruding and the like.

[0271] Suitable carriers for use in the solid dosage forms described herein include, but are not limited to, acacia, gelatin, colloidal silicon dioxide, calcium glycerophosphate, calcium lactate, maltodextrin, glycerine, magnesium silicate, sodium caseinate, soy lecithin, sodium chloride, tricalcium phosphate, dipotassium phosphate, sodium stearoyl lactylate, carrageenan, monoglyceride, diglyceride, pregelatinized starch, hydroxypropylmethylcellulose, hydroxypropylmethylcellulose acetate stearate, sucrose, microcrystalline cellulose, lactose, mannitol and the like.

[0272] Suitable filling agents for use in the solid dosage forms described herein include, but are not limited to, lactose, calcium carbonate, calcium phosphate, dibasic calcium phosphate, calcium sulfate, microcrystalline cellulose, cellulose powder, dextrose, dextrates, dextran, starches, pregelatinized starch, hydroxypropylmethycellulose (HPMC), hydroxypropylmethycellulose phthalate, hydroxypropylmethylcellulose acetate stearate (HPMCAS), sucrose, xylitol, lactitol, mannitol, sorbitol, sodium chloride, polyethylene glycol, and the like.

[0273] Suitable disintegrants for use in the solid dosage forms described herein include, but are not limited to, natural starch such as corn starch or potato starch, a pregelatinized starch, or sodium starch glycolate, a cellulose such as methylcrystalline cellulose, methylcellulose, microcrystalline cellulose, croscarmellose, or a cross-linked cellulose, such as cross-linked sodium carboxymethylcellulose, cross-linked carboxymethylcellulose, or cross-linked croscarmellose, a cross-linked starch such as sodium starch glycolate, a cross-linked polymer such as crospovidone, a cross-linked polyvinylpyrrolidone, alginate such as alginic acid or a salt of alginic acid such as sodium alginate, a gum such as agar, guar, locust bean, Karaya, pectin, or tragacanth, sodium starch glycolate, bentonite, sodium lauryl sulfate, sodium lauryl sulfate in combination starch, and the like.

[0274] Binders impart cohesiveness to solid oral dosage form formulations: for powder filled capsule formulation, they aid in plug formation that can be filled into soft or hard shell capsules and for tablet formulation, they ensure the tablet remaining intact after compression and help assure blend uniformity prior to a compression or fill step. Materials suitable for use as binders in the solid dosage forms described herein include, but are not limited to, carboxymethylcellulose, methylcellulose, hydroxypropylmethylcellulose, hydroxypropylmethylcellulose acetate stearate, hydroxyethylcellulose, hydroxypropylcellulose, ethylcellulose, and microcrystalline cellulose, microcrystalline dextrose, amylose, magnesium aluminum silicate, polysaccharide acids, bentonites, gelatin, polyvinylpyrrolidone/vinyl acetate copolymer, crospovidone, povidone, starch, pregelatinized starch, tragacanth, dextrin, a sugar, such as sucrose, glucose, dextrose, molasses, mannitol, sorbitol, xylitol, lactose, a natural or synthetic gum such as acacia, tragacanth, ghatti gum, mucilage of isapol husks, starch, polyvinylpyrrolidone, larch arabogalactan, polyethylene glycol, waxes, sodium alginate, and the like.

[0275] In general, binder levels of 20-70% are used in powder-filled gelatin capsule formulations. Binder usage level in tablet formulations varies whether direct compression, wet granulation, roller compaction, or usage of other excipients such as fillers which itself can act as moderate binder. Binder levels of up to 70% in tablet formulations is common.

[0276] Suitable lubricants or glidants for use in the solid dosage forms described herein include, but are not limited to, stearic acid, calcium hydroxide, talc, corn starch, sodium stearyl fumerate, alkali-metal and alkaline earth metal salts, such as aluminum, calcium, magnesium, zinc, stearic acid, sodium stearates, magnesium stearate, zinc stearate, waxes, Stearowet®, boric acid, sodium benzoate, sodium acetate, sodium chloride, leucine, a polyethylene glycol or a methoxypolyethylene glycol such as Carbowax™, PEG 4000, PEG 5000, PEG 6000, propylene glycol, sodium oleate, glyceryl behenate, glyceryl palmitostearate, glyceryl benzoate, magnesium or sodium lauryl sulfate, and the like.

[0277] Suitable diluents for use in the solid dosage forms described herein include, but are not limited to, sugars (including lactose, sucrose, and dextrose), polysaccharides (including dextrates and maltodextrin), polyols (including mannitol, xylitol, and sorbitol), cyclodextrins and the like.

[0278] Suitable wetting agents for use in the solid dosage forms described herein include, for example, oleic acid, glyceryl monostearate, sorbitan monooleate, sorbitan monolaurate, triethanolamine oleate, polyoxyethylene sorbitan monooleate, polyoxyethylene sorbitan monolaurate, quaternary ammonium compounds (e.g., Polyquat 10®), sodium oleate, sodium lauryl sulfate, magnesium stearate, sodium docusate, triacetin, vitamin E TPGS and the like.

[0279] Suitable surfactants for use in the solid dosage forms described herein include, for example, sodium lauryl sulfate, sorbitan monooleate, polyoxyethylene sorbitan monooleate, polysorbates, polaxomers, bile salts, glyceryl monostearate, copolymers of ethylene oxide and propylene oxide, e.g., Pluronic® (BASF), and the like.

[0280] Suitable suspending agents for use in the solid dosage forms described here include, but are not limited to, polyvinylpyrrolidone, e.g., polyvinylpyrrolidone K12, polyvinylpyrrolidone K17, polyvinylpyrrolidone K25, or polyvinylpyrrolidone K30, polyethylene glycol, e.g., the polyethylene glycol can have a molecular weight of about 300 to about 6000, or about 3350 to about 4000, or about 7000 to about 5400, vinyl pyrrolidone/vinyl acetate copolymer (S630), sodium carboxymethylcellulose, methylcellulose, hydroxypropylmethylcellulose, polysorbate-80, hydroxyethylcellulose, sodium alginate, gums, such as, e.g., gum tragacanth and gum acacia, guar gum, xanthans, including xanthan gum, sugars, cellulosics, such as, e.g., sodium carboxymethylcellulose, methylcellulose, sodium carboxymethylcellulose, hydroxypropylmethylcellulose, hydroxyethylcellulose, polysorbate-80, sodium alginate, polyethoxylated sorbitan monolaurate, polyethoxylated sorbitan monolaurate, povidone and the like.

[0281] Suitable antioxidants for use in the solid dosage forms described herein include, for example, e.g., butylated hydroxytoluene (BHT), sodium ascorbate, and tocopherol.

[0282] It should be appreciated that there is considerable overlap between additives used in the solid dosage forms described herein. Thus, the above-listed additives should be taken as merely exemplary, and not limiting, of the types of additives that can be included in solid dosage forms of the pharmaceutical compositions described herein. The amounts of such additives can be readily determined by one skilled in the art, according to the particular properties desired.

[0283] In various embodiments, the particles of a therapeutic agents and one or more excipients are dry blended and compressed into a mass, such as a tablet, having a hardness sufficient to provide a pharmaceutical composition that substantially disintegrates within less than about 30 minutes, less than about 35 minutes, less than about 40 minutes, less than about 45 minutes, less than about 50 minutes, less than about 55 minutes, or less than about 60 minutes, after oral administration, thereby releasing the formulation into the gastrointestinal fluid.

[0284] In other embodiments, a powder including a therapeutic agent is formulated to include one or more pharmaceutical excipients and flavors. Such a powder is prepared, for example, by mixing the therapeutic agent and optional pharmaceutical excipients to form a bulk blend composition. Additional embodiments also include a suspending agent and/or a wetting agent. This bulk blend is uniformly subdivided into unit dosage packaging or multi-dosage packaging units.

[0285] In still other embodiments, effervescent powders are also prepared. Effervescent salts have been used to disperse medicines in water for oral administration.

[0286] In some embodiments, the pharmaceutical dosage forms are formulated to provide a controlled release of a therapeutic agent. Controlled release refers to the release of the therapeutic agent from a dosage form in which it is incorporated according to a desired profile over an extended period of time. Controlled release profiles include, for example, sustained release, prolonged release, pulsatile release, and delayed release profiles. In contrast to immediate release compositions, controlled release compositions allow delivery of an agent to a subject over an extended period of time according to a predetermined profile. Such release rates can provide therapeutically effective levels of agent for an extended period of time and thereby provide a longer period of pharmacologic response while minimizing side effects as compared to conventional rapid release dosage forms. Such longer periods of response provide for many inherent benefits that are not achieved with the corresponding short acting, immediate release preparations.

[0287] In some embodiments, the solid dosage forms described herein are formulated as enteric coated delayed release oral dosage forms, i.e., as an oral dosage form of a pharmaceutical composition as described herein which utilizes an enteric coating to affect release in the small intestine or large intestine. In one aspect, the enteric coated dosage form is a compressed or molded or extruded tablet/mold (coated or uncoated) containing granules, powder, pellets, beads or particles of the active ingredient and/or other composition components, which are themselves coated or uncoated. In one aspect, the enteric coated oral dosage form is in the form of a capsule containing pellets, beads or granules, which include a therapeutic agent that are coated or uncoated.

[0288] Any coatings should be applied to a sufficient thickness such that the entire coating does not dissolve in the gastrointestinal fluids at pH below about 5, but does dissolve at pH about 5 and above. Coatings are typically selected from any of the following: Shellac—this coating dissolves in media of pH>7; Acrylic polymers—examples of suitable acrylic polymers include methacrylic acid copolymers and ammonium methacrylate copolymers. The Eudragit series E, L, S, RL, RS and NE (Rohm Pharma) are available as solubilized in organic solvent, aqueous dispersion, or dry powders. The Eudragit series RL, NE, and RS are insoluble in the gastrointestinal tract but are permeable and are used primarily for colonic targeting. The Eudragit series E dissolve in the stomach. The Eudragit series L, L-30D and S are insoluble in stomach and dissolve in the intestine; Poly Vinyl Acetate Phthalate (PVAP)—PVAP dissolves in pH>5, and it is much less permeable to water vapor and gastric fluids. Conventional coating techniques such as spray or pan coating are employed to apply coatings. The coating thickness must be sufficient to ensure that the oral dosage form remains intact until the desired site of topical delivery in the intestinal tract is reached.

[0289] In other embodiments, the formulations described herein are delivered using a pulsatile dosage form. A pulsatile dosage form is capable of providing one or more immediate release pulses at predetermined time points after a controlled lag time or at specific sites. Exemplary pulsatile dosage forms and methods of their manufacture are disclosed in U.S. Pat. Nos. 5,011,692, 5,017,381, 5,229,135, 5,840,329 and 5,837,284. In one embodiment, the pulsatile dosage form includes at least two groups of particles, (i.e. multiparticulate) each containing the formulation described herein. The first group of particles provides a substantially immediate dose of a therapeutic agent upon ingestion by a mammal. The first group of particles can be either uncoated or include a coating and/or sealant. In one aspect, the second group of particles comprises coated particles. The coating on the second group of particles provides a delay of from about 2 hours to about 7 hours following ingestion before release of the second dose. Suitable coatings for pharmaceutical compositions are described herein or known in the art.

[0290] In some embodiments, pharmaceutical formulations are provided that include particles of a therapeutic agent and at least one dispersing agent or suspending agent for oral administration to a subject. The formulations may be a powder and/or granules for suspension, and upon admixture with water, a substantially uniform suspension is obtained.

[0291] In some embodiments, particles formulated for controlled release are incorporated in a gel or a patch or a wound dressing.

[0292] In one aspect, liquid formulation dosage forms for oral administration and/or for topical administration as a wash are in the form of aqueous suspensions selected from the group including, but not limited to, pharmaceutically acceptable aqueous oral dispersions, emulsions, solutions, elixirs, gels, and syrups. See, e.g., Singh et al., Encyclopedia of Pharmaceutical Technology, 2nd Ed., pp. 754-757 (2002). In addition to the particles of a therapeutic agent, the liquid dosage forms include additives, such as: (a) disintegrating agents; (b) dispersing agents; (c) wetting agents; (d) at least one preservative, (e) viscosity enhancing agents, (f) at least one sweetening agent, and (g) at least one flavoring agent. In some embodiments, the aqueous dispersions can further include a crystalline inhibitor.

[0293] In some embodiments, the liquid formulations also include inert diluents commonly used in the art, such as water or other solvents, solubilizing agents, and emulsifiers. Exemplary emulsifiers are ethyl alcohol, isopropyl alcohol, ethyl carbonate, ethyl acetate, benzyl alcohol, benzyl benzoate, propyleneglycol, 1,3-butyleneglycol, dimethylformamide, sodium lauryl sulfate, sodium docusate, cholesterol, cholesterol esters, taurocholic acid, phosphatidylcholine, oils, such as cottonseed oil, groundnut oil, corn germ oil, olive oil, castor oil, and sesame oil, glycerol, tetrahydrofurfuryl alcohol, polyethylene glycols, fatty acid esters of sorbitan, or mixtures of these substances, and the like.

[0294] Furthermore, pharmaceutical compositions optionally include one or more pH adjusting agents or buffering agents, including acids such as acetic, boric, citric, lactic, phosphoric and hydrochloric acids; bases such as sodium hydroxide, sodium phosphate, sodium borate, sodium citrate, sodium acetate, sodium lactate and tris-hydroxymethylaminomethane; and buffers such as citrate/dextrose, sodium bicarbonate and ammonium chloride. Such acids, bases and buffers are included in an amount required to maintain pH of the composition in an acceptable range.

[0295] Additionally, pharmaceutical compositions optionally include one or more salts in an amount required to bring osmolality of the composition into an acceptable range. Such salts include those having sodium, potassium or ammonium cations and chloride, citrate, ascorbate, borate, phosphate, bicarbonate, sulfate, thiosulfate or bisulfite anions; suitable salts include sodium chloride, potassium chloride, sodium thiosulfate, sodium bisulfite and ammonium sulfate.

[0296] Other pharmaceutical compositions optionally include one or more preservatives to inhibit microbial activity. Suitable preservatives include mercury-containing substances such as merfen and thiomersal; stabilized chlorine dioxide; and quaternary ammonium compounds such as benzalkonium chloride, cetyltrimethylammonium bromide and cetylpyridinium chloride.

[0297] In one embodiment, the aqueous suspensions and dispersions described herein remain in a homogenous state, as defined in The USP Pharmacists' Pharmacopeia (2005 edition, chapter 905), for at least 4 hours. In one embodiment, an aqueous suspension is re-suspended into a homogenous suspension by physical agitation lasting less than 1 minute. In still another embodiment, no agitation is necessary to maintain a homogeneous aqueous dispersion.

[0298] Examples of disintegrating agents for use in the aqueous suspensions and dispersions include, but are not limited to, a starch, e.g., a natural starch such as corn starch or potato starch, a pregelatinized starch, or sodium starch glycolate; a cellulose such as methylcrystalline cellulose, methylcellulose, croscarmellose, or a cross-linked cellulose, such as cross-linked sodium carboxymethylcellulose, cross-linked carboxymethylcellulose, or cross-linked croscarmellose; a cross-linked starch such as sodium starch glycolate; a cross-linked polymer such as crospovidone; a cross-linked polyvinylpyrrolidone; alginate such as alginic acid or a salt of alginic acid such as sodium alginate; a gum such as agar, guar, locust bean, Karaya, pectin, or tragacanth; sodium starch glycolate; bentonite; a natural sponge; a surfactant; a resin such as a cation-exchange resin; citrus pulp; sodium lauryl sulfate; sodium lauryl sulfate in combination starch; and the like.

[0299] In some embodiments, the dispersing agents suitable for the aqueous suspensions and dispersions described herein include, for example, hydrophilic polymers, electrolytes, Tween @60 or 80, PEG, polyvinylpyrrolidone, and the carbohydrate-based dispersing agents such as, for example, hydroxypropylcellulose and hydroxypropyl cellulose ethers, hydroxypropyl methylcellulose and hydroxypropyl methylcellulose ethers, carboxymethylcellulose sodium, methylcellulose, hydroxyethylcellulose, hydroxypropylmethyl-cellulose phthalate, hydroxypropylmethyl-cellulose acetate stearate, noncrystalline cellulose, magnesium aluminum silicate, triethanolamine, polyvinyl alcohol (PVA), polyvinylpyrrolidone/vinyl acetate copolymer, 4-(1,1,3,3-tetramethylbutyl)-phenol polymer with ethylene oxide and formaldehyde (also known as tyloxapol), poloxamers; and poloxamines. In other embodiments, the dispersing agent is selected from a group not comprising one of the following agents: hydrophilic polymers; electrolytes; Tween® 60 or 80; PEG; polyvinylpyrrolidone (PVP); hydroxypropylcellulose and hydroxypropyl cellulose ethers; hydroxypropyl methylcellulose and hydroxypropyl methylcellulose ethers; carboxymethylcellulose sodium; methylcellulose; hydroxyethylcellulose; hydroxypropylmethyl-cellulose phthalate; hydroxypropylmethyl-cellulose acetate stearate; non-crystalline cellulose; magnesium aluminum silicate; triethanolamine; polyvinyl alcohol (PVA); 4-(1,1,3,3-tetramethylbutyl)-phenol polymer with ethylene oxide and formaldehyde; poloxamers; or poloxamines.

[0300] Wetting agents suitable for the aqueous suspensions and dispersions described herein include, but are not limited to, cetyl alcohol, glycerol monostearate, polyoxyethylene sorbitan fatty acid esters (e.g., the commercially available Tweens® such as e.g., Tween 20@ and Tween 80@, and polyethylene glycols, oleic acid, glyceryl monostearate, sorbitan monooleate, sorbitan monolaurate, triethanolamine oleate, polyoxyethylene sorbitan monooleate, polyoxyethylene sorbitan monolaurate, sodium oleate, sodium lauryl sulfate, sodium docusate, triacetin, vitamin E TPGS, sodium taurocholate, simethicone, phosphatidylcholine and the like.

[0301] Suitable preservatives for the aqueous suspensions or dispersions described herein include, for example, potassium sorbate, parabens (e.g., methylparaben and propylparaben), benzoic acid and its salts, other esters of parahydroxybenzoic acid such as butylparaben, alcohols such as ethyl alcohol or benzyl alcohol, phenolic compounds such as phenol, or quaternary compounds such as benzalkonium chloride. Preservatives, as used herein, are incorporated into the dosage form at a concentration sufficient to inhibit microbial growth.

[0302] Suitable viscosity enhancing agents for the aqueous suspensions or dispersions described herein include, but are not limited to, methyl cellulose, xanthan gum, carboxymethyl cellulose, hydroxypropyl cellulose, hydroxypropylmethyl cellulose, Plasdon® S-630, carbomer, polyvinyl alcohol, alginates, acacia, chitosans and combinations thereof. The concentration of the viscosity enhancing agent will depend upon the agent selected and the viscosity desired.

[0303] Examples of sweetening agents suitable for the aqueous suspensions or dispersions described herein include, for example, acacia syrup, acesulfame K, alitame, aspartame, chocolate, cinnamon, citrus, cocoa, cyclamate, dextrose, fructose, ginger, glycyrrhetinate, glycyrrhiza (licorice) syrup, monoammonium glyrrhizinate (MagnaSweet®), malitol, mannitol, menthol, neohesperidine DC, neotame, Prosweet® Powder, saccharin, sorbitol, stevia, sucralose, sucrose, sodium saccharin, saccharin, aspartame, acesulfame potassium, mannitol, sucralose, tagatose, thaumatin, vanilla, xylitol, or any combination thereof.

[0304] In some embodiments, a therapeutic agent is prepared as transdermal dosage form. In some embodiments, the transdermal formulations described herein include at least three components: (1) a therapeutic agent; (2) a penetration enhancer; and (3) an optional aqueous adjuvant. In some embodiments the transdermal formulations include additional components such as, but not limited to, gelling agents, creams and ointment bases, and the like. In some embodiments, the transdermal formulation is presented as a patch or a wound dressing. In some embodiments, the transdermal formulation further include a woven or non-woven backing material to enhance absorption and prevent the removal of the transdermal formulation from the skin. In other embodiments, the transdermal formulations described herein can maintain a saturated or supersaturated state to promote diffusion into the skin.

[0305] In one aspect, formulations suitable for transdermal administration of a therapeutic agent described herein employ transdermal delivery devices and transdermal delivery patches and can be lipophilic emulsions or buffered, aqueous solutions, dissolved and/or dispersed in a polymer or an adhesive. In one aspect, such patches are constructed for continuous, pulsatile, or on demand delivery of pharmaceutical agents. Still further, transdermal delivery of the therapeutic agents described herein can be accomplished by means of iontophoretic patches and the like. In one aspect, transdermal patches provide controlled delivery of a therapeutic agent. In one aspect, transdermal devices are in the form of a bandage comprising a backing member, a reservoir containing the therapeutic agent optionally with carriers, optionally a rate controlling barrier to deliver the therapeutic agent to the skin of the host at a controlled and predetermined rate over a prolonged period of time, and means to secure the device to the skin.

[0306] In further embodiments, topical formulations include gel formulations (e.g., gel patches which adhere to the skin). In some of such embodiments, a gel composition includes any polymer that forms a gel upon contact with the body (e.g., gel formulations comprising hyaluronic acid, pluronic polymers, poly(lactic-co-glycolic acid (PLGA)-based polymers or the like). In some forms of the compositions, the formulation comprises a low-melting wax such as, but not limited to, a mixture of fatty acid glycerides, optionally in combination with cocoa butter which is first melted. Optionally, the formulations further comprise a moisturizing agent.

[0307] In certain embodiments, delivery systems for pharmaceutical therapeutic agents may be employed, such as, for example, liposomes and emulsions. In certain embodiments, compositions provided herein can also include an mucoadhesive polymer, selected from among, for example, carboxymethylcellulose, carbomer (acrylic acid polymer), poly(methylmethacrylate), polyacrylamide, polycarbophil, acrylic acid/butyl acrylate copolymer, sodium alginate and dextran.

[0308] In some embodiments, a therapeutic agent described herein may be administered topically and can be formulated into a variety of topically administrable compositions, such as solutions, suspensions, lotions, gels, pastes, medicated sticks, balms, creams or ointments. Such pharmaceutical therapeutic agents can contain solubilizers, stabilizers, tonicity enhancing agents, buffers and preservatives.

[0309] B. Methods of Treatment

[0310] In certain embodiments, described herein are methods for evaluating an effect of a treatment described herein. In some instances, the treatment comprises administration with a therapeutic agent and optionally, one or more additional therapeutic agents. In some instances, the treatment is monitored by evaluating the quantity of TL1A in the subject prior to and/or after administration of a therapeutic agent.

### NUMBERED EMBODIMENTS

[0311] Non-limiting embodiments of the present disclosure include the following:
[0312] 1. A method of treating a subject having or suspected of having at least one of an inflammatory, fibrostenotic, and fibrotic, disease or condition the method comprising:
   [0313] a) identifying the subject as being a carrier of a genotype comprising a polymorphism provided in Table 1 or Tables 10A-10E, or a polymorphism in linkage disequilibrium (LD) therewith; and
   [0314] b) administering to the subject a therapeutically effective amount of an anti-TL1A antibody, anti-CD30L antibody, glucocorticosteroid, anti-TNF therapy, anti-a4-b7 therapy, anti-IL12p40 therapy, JAK inhibitor, thalidomide, or cyclophosphamide, or a combination thereof.
[0315] 2. The method of embodiment 1, provided that the inflammatory disease comprises Crohn's disease.
[0316] 3. The method of embodiment 2, provided that the Crohn's disease comprises ileal, ileocolonic, or colonic Crohn's disease.
[0317] 4. The method of embodiment 1, provided that the inflammatory disease comprises ulcerative colitis (UC).
[0318] 5. The method of embodiment 4, provided that the UC is medically refractory UC.
[0319] 6. The method of any of embodiments 1-5, wherein identifying the subject as being a carrier of the genotype of step (a) comprises:
   [0320] a) contacting a sample comprising genetic material from the subject with a nucleic acid sequence capable of hybridizing to at least 10 contiguous nucleobases comprising a risk allele located at nucleoposition 501 within any one of SEQ ID NOS: 2001-2031; and
   [0321] b) detecting binding between the nucleic acid sequence and the at least 10 contiguous nucleobases comprising the risk allele.
[0322] 7. The method of embodiment 6, provided that the standard hybridization conditions comprise an annealing temperature between about 35° C. and about 65° C.
[0323] 8. The method of embodiment 6 or embodiment 7, provided that the standard hybridization conditions are performed with a TaqMan master mix solution.
[0324] 9. The method of any of embodiments 6-8, provided that the nucleic acid sequence is conjugated to a detectable molecule.
[0325] 10. The method of embodiment 9, provided that the detectable molecule comprises a fluorophore.
[0326] 11. The method of any of embodiments 6-10, provided that the nucleic acid sequence is conjugated to a quencher.
[0327] 12. The method of any of embodiments 6-11, provided that the sample comprising genetic material from the subject is amplified genetic material obtained from a nucleic acid amplification assay.
[0328] 13. The method of embodiment 12, provided that the nucleic acid amplification assay comprises amplification of DNA from the subject with a pair of primers capable of amplifying at least 15 contiguous nucleobases comprising the risk allele located at nucleoposition 51 within any one of SEQ ID NOS: 2001-2031, the pair of primers comprising a first primer and a second primer.
[0329] 14. The method of embodiment 12, provided that the first primer comprises a nucleic acid sequence complimentary to at least 15 contiguous nucleobases upstream of the risk allele located at nucleobase 51 within any one of SEQ ID NOS: 2001-2031, and the second primer comprises a nucleic acid sequence complimentary to at least 15 contiguous nucleobases downstream of the risk allele located at nucleobase 51 within any one of SEQ ID NOS: 2001-2031.
[0330] 15. The method of any of embodiments 1-14, provided that the subject has been determined to be a carrier of the genotype by a process comprising DNA sequencing.
[0331] 16. The method of any of embodiments 1-15, provided that the subject further comprises soluble TL1A at a level greater than a control level derived from a non-diseased individual or population of non-diseased individuals.
[0332] 17. The method of any of embodiments 1-16, provided that the subject is homozygous for the genotype.
[0333] 18. The method of any of embodiments 1-17, wherein the genotype comprises at least two polymorphisms provided in Table 1 or Tables 10A-10E.
[0334] 19. The method of any of embodiments 1-17, wherein the genotype comprises at least three polymorphisms provided in Table 1 or Tables 10A-10E.
[0335] 20. The method of any of embodiments 1-19, wherein the genotype comprises a polymorphism selected from the group consisting of a “A”, or “T” allele at rs2516514 (SEQ ID NO:2001); a “A”, or “G” allele at rs17030062 (SEQ ID NO:2002); a “A”, or “G” allele at rs9305694 (SEQ ID NO:2003); a “C”, or “A” allele at rs139009610 (SEQ ID NO:2004); a “T”, or “C” allele at rs28732100 (SEQ ID NO:2005); a “A”, T”, or “T” allele at rs12199223 (SEQ ID NO:2006); a “C”, or “G” allele at rs1265181 (SEQ ID NO:2007); a “T”, or “A” allele at rs13417109 (SEQ ID NO:2008); a “C”, or “A” allele at rs17026757 (SEQ ID NO:2009); a “C”, C”, or “T” allele at rs117670930 (SEQ ID NO:2010); a “T”, or “G” allele at rs115994059 (SEQ ID NO:2011); a “G”, or “A” allele at rs7297515 (SEQ ID NO:2012); a “A”, or “G” allele at rs13166683 (SEQ ID NO:2013); a “A”, C”, or “T” allele at rs62376929 (SEQ ID NO:2014); a “C”, T”, or “T” allele at rs4418214 (SEQ ID NO:2015); a “G”, T”, or “T” allele at rs3819299 (SEQ ID NO:2016); a “A”, or “G” allele at rs2373969 (SEQ ID NO:2017); a “A”, A”, or “G” allele at rs4151651 (SEQ ID NO:2018); a “A”, T”, or “G” allele at rs9366775 (SEQ ID NO:2019); a “C”, or “A” allele at rs2858884 (SEQ ID NO:2020); a “C”, or “T” allele at rs2858319 (SEQ ID NO:2021); a “C”, or “G” allele at rs6917611 (SEQ ID NO:2022); a “T”, T”, or “G” allele at rs6930571 (SEQ ID NO:2023); a “T”, C”, T”, or “C” allele at rs389419 (SEQ ID NO:2024); a “G”, G”, T”, or “T” allele at rs76558762 (SEQ ID NO:2025); a “C”, or “G” allele at rs7956721 (SEQ ID NO:2026); a “A”, T”, or “G” allele at rs887864 (SEQ ID NO:2027); a “A”, G”, or “C” allele at rs9276424 (SEQ ID NO:2028); a “G”, or “A” allele at rs10056322 (SEQ ID NO:2029); a “C”, or “A” allele at rs6461986 (SEQ ID NO:2030); or a “A”, or “C” allele at rs13421864. (SEQ ID NO:2031).
[0336] 21. The method of embodiments 1-20, wherein the therapeutic agent is an anti-TL1A antibody.
[0337] 22. The method of embodiment 21, wherein the anti-TL1A antibody is selected from Table 2C.
[0338] 23. The method of embodiment 21, wherein the anti-TL1A antibody comprises an amino acid sequence provided in any one of Tables 2A-2H.
[0339] 24. The method of embodiment 21, wherein the anti-TL1A antibody binds to the same region of human TL1A as a reference antibody selected from Table 2C.
[0340] 25. The method of embodiment 21, wherein the anti-TL1A antibody binds to the same region of human TL1A as a reference antibody, the reference antibody comprising an amino acid sequence provided in any one of Tables 2A-2H.
[0341] 26. The method of embodiments 21-25, wherein the anti-TL1A antibody is a neutralizing TL1A antibody.
[0342] 27. The method of embodiments 21-26, wherein the anti-TL1A antibody is an antagonist of TL1A.
[0343] 28. A method of treating an inflammatory, fibrostenotic, and fibrotic, disease or condition in a subject comprising administering to the subject a therapeutically effective amount of a therapeutic agent, provided a presence of a genotype is detected in a sample obtained from the subject.
[0344] 29. A method of treating an inflammatory, fibrostenotic, and fibrotic, disease or condition in a subject comprising:
   [0345] a) analyzing a sample obtained from a subject to detect a presence or an absence of a genotype;
   [0346] b) detect the presence of the genotype in the sample obtained from the subject;
   [0347] c) administering to the subject a therapeutically effective amount of a therapeutic agent.
[0348] 30. The method of embodiment 28-29, provided that the inflammatory disease comprises Crohn's disease.
[0349] 31. The method of embodiment 30, provided that the Crohn's disease comprises ileal, ileocolonic, or colonic Crohn's disease.
[0350] 32. The method of embodiment 28-29, provided that the inflammatory disease is ulcerative colitis (UC).
[0351] 33. The method of embodiment 32, provided that the UC is medically refractory UC.
[0352] 34. The method of any of embodiments 29-33, wherein the presence of the genotype is detected in the sample obtained from the subject by:
   [0353] a) contacting the sample comprising genetic material from the subject with a nucleic acid sequence capable of hybridizing to at least 10 contiguous nucleobases comprising a risk allele located at nucleoposition 501 within any one of SEQ ID NOS: 2001-2031; and
   [0354] b) detecting binding between the nucleic acid sequence and the at least 10 contiguous nucleobases comprising the risk allele.
[0355] 35. The method of embodiment 34, provided that the standard hybridization conditions comprise an annealing temperature between about 35° C. and about 65° C.
[0356] 36. The method of embodiment 34 or embodiment 35, provided that the standard hybridization conditions are performed with a TaqMan master mix solution.
[0357] 37. The method of any of embodiments 34-36, provided that the nucleic acid sequence is conjugated to a detectable molecule.
[0358] 38. The method of embodiment 37, provided that the detectable molecule comprises a fluorophore.
[0359] 39. The method of any of embodiments 34-38, provided that the nucleic acid sequence is conjugated to a quencher.
[0360] 40. The method of any of embodiments 34-39, provided that the sample comprising genetic material from the subject is amplified genetic material obtained from a nucleic acid amplification assay.
[0361] 41. The method of embodiment 40, provided that the nucleic acid amplification assay comprises amplification of DNA from the subject with a pair of primers capable of amplifying at least 15 contiguous nucleobases comprising the risk allele located at nucleoposition 501 within any one of SEQ ID NOS: 2001-2031, the pair of primers comprising a first primer and a second primer.
[0362] 42. The method of embodiment 41, provided that the first primer comprises a nucleic acid sequence complimentary to at least 15 contiguous nucleobases upstream of the risk allele located at nucleobase 51 within any one of SEQ ID NOS: 2001-2031, and the second primer comprises a nucleic acid sequence complimentary to at least 15 contiguous nucleobases downstream of the risk allele located at nucleobase 51 within any one of SEQ ID NOS: 2001-2031.
[0363] 43. The method of any of embodiments 29-42 the presence of the genotype is detected in the sample obtained from the subject by a process comprising DNA sequencing.
[0364] 44. The method of any of embodiments 29-43, provided that the subject further comprises soluble TL1A at a level greater than a control level derived from a non-diseased individual or population of non-diseased individuals.
[0365] 45. The method of any of embodiments 29-44, provided that the subject is homozygous for the genotype.
[0366] 46. The method of any of embodiments 29-45, wherein the genotype comprises at least two polymorphisms provided in Table 1 or Tables 10A-10E.
[0367] 47. The method of any of embodiments 29-46, wherein the genotype comprises at least three polymorphisms provided in Table 1 or Tables 10A-10E.
[0368] 48. The method of any of embodiments 29-47, wherein the genotype comprises a polymorphism selected from the group consisting of a “A”, or “T” allele at rs2516514 (SEQ ID NO:2001); a “A”, or “G” allele at rs17030062 (SEQ ID NO:2002); a “A”, or “G” allele at rs9305694 (SEQ ID NO:2003); a “C”, or “A” allele at rs139009610 (SEQ ID NO:2004); a “T”, or “C” allele at rs28732100 (SEQ ID NO:2005); a “A”, T”, or “T” allele at rs12199223 (SEQ ID NO:2006); a “C”, or “G” allele at rs1265181 (SEQ ID NO:2007); a “T”, or “A” allele at rs13417109 (SEQ ID NO:2008); a “C”, or “A” allele at rs17026757 (SEQ ID NO:2009); a “C”, C”, or “T” allele at rs117670930 (SEQ ID NO:2010); a “T”, or “G” allele at rs115994059 (SEQ ID NO:2011); a “G”, or “A” allele at rs7297515 (SEQ ID NO:2012); a “A”, or “G” allele at rs13166683 (SEQ ID NO:2013); a “A”, C”, or “T” allele at rs62376929 (SEQ ID NO:2014); a “C”, T”, or “T” allele at rs4418214 (SEQ ID NO:2015); a “G”, T”, or “T” allele at rs3819299 (SEQ ID NO:2016); a “A”, or “G” allele at rs2373969 (SEQ ID NO:2017); a “A”, A”, or “G” allele at rs4151651 (SEQ ID NO:2018); a “A”, T”, or “G” allele at rs9366775 (SEQ ID NO:2019); a “C”, or “A” allele at rs2858884 (SEQ ID NO:2020); a “C”, or “T” allele at rs2858319 (SEQ ID NO:2021); a “C”, or “G” allele at rs6917611 (SEQ ID NO:2022); a “T”, T”, or “G” allele at rs6930571 (SEQ ID NO:2023); a “T”, C”, T”, or “C” allele at rs389419 (SEQ ID NO:2024); a “G”, G”, T”, or “T” allele at rs76558762 (SEQ ID NO:2025); a “C”, or “G” allele at rs7956721 (SEQ ID NO:2026); a “A”, T”, or “G” allele at rs887864 (SEQ ID NO:2027); a “A”, G”, or “C” allele at rs9276424 (SEQ ID NO:2028); a “G”, or “A” allele at rs10056322 (SEQ ID NO:2029); a “C”, or “A” allele at rs6461986 (SEQ ID NO:2030); or a “A”, or “C” allele at rs13421864. (SEQ ID NO:2031).
[0369] 49. The method of embodiments 29-48, wherein the therapeutic agent is an anti-TL1A antibody, anti-CD30L antibody, glucocorticosteroid, anti-TNF therapy, anti-a4-b7 therapy, anti-IL12p40 therapy, JAK inhibitor, thalidomide, or cyclophosphamide, or a combination thereof.
[0370] 50. The method of embodiment 49, wherein the therapeutic agent is an anti-TL1A antibody.
[0371] 51. The method of embodiment 50, wherein the anti-TL1A antibody is selected from Table 2C.
[0372] 52. The method of embodiment 50, wherein the anti-TL1A antibody comprises an amino acid sequence provided in any one of Tables 2A-2H.
[0373] 53. The method of embodiment 50, wherein the anti-TL1A antibody binds to the same region of human TL1A as a reference antibody selected from Table 2C.
[0374] 54. The method of embodiment 50, wherein the anti-TL1A antibody binds to the same region of human TL1A as a reference antibody, the reference antibody comprising an amino acid sequence provided in any one of Tables 2A-2H.
[0375] 55. The method of embodiments 50-54, wherein the anti-TL1A antibody is a neutralizing TL1A antibody.
[0376] 56. The method of embodiments 50-55, wherein the anti-TL1A antibody is an antagonist of TL1A.
[0377] 57. A method of characterizing at least one of an inflammatory, fibrostenotic, and fibrotic, disease or condition of a subject, the method comprising assaying genetic material from the subject to identify the presence or absence of a genotype comprising a polymorphism provided in Table 1 or Tables 10A-10E.
[0378] 58. The method of embodiment 57, further comprising assigning a more favorable prognosis to treatment with a therapeutic agent when the genotype is present.
[0379] 59. The method of embodiment 57, further comprising assigning a less favorable prognosis to with a therapeutic agent when the genotype is absent.
[0380] 60. The method of embodiment 57, further comprising assigning the subject to treatment with a therapeutic agent when the genotype is present.
[0381] 61. The method of embodiment 57, further comprising prescribing to the subject a therapeutic agent when the genotype is present.
[0382] 62. The method of embodiment 57, further comprising administering to the subject an inhibitor of anti-CD30 ligand activity or expression when the genotype is present.
[0383] 63. The method of any of embodiments 58-62, provided that the therapeutic agent is an anti-TL1A antibody or antigen-binding fragment thereof.
[0384] 64. The method of any of embodiments 57-63, provided that assaying comprises amplifying from the genetic material comprising at least 15 contiguous nucleobases including a risk allele located at nucleoposition 501 within any one of SEQ ID NOS: 2001-2031 using a pair of primers comprising a first primer and a second primer.
[0385] 65. The method of any of embodiment 64, provided that the first primer comprises a nucleic acid sequence complimentary to at least 15 contiguous nucleobases upstream of the risk allele located at nucleobase 51 within any one of SEQ ID NOS: 2001-2031, and the second primer comprises a nucleic acid sequence complimentary to at least 15 contiguous nucleobases downstream of the risk allele located at nucleobase 501 within any one of SEQ ID NOS: 2001-2031.
[0386] 66. The method of any of embodiments 57-65, provided that assaying comprises hybridizing to the genetic material a nucleic acid comprising any one of SEQ ID NOS: 2001-2031.
[0387] 67. The method of embodiment 66, provided that the nucleic acid sequence is conjugated to a detectable molecule.
[0388] 68. The method of embodiment 67, provided that the detectable molecule comprises a fluorophore.
[0389] 69. The method of any of embodiments 66-68, provided that the nucleic acid sequence is conjugated to a quencher.
[0390] 70. The method of any of embodiments 57-65, provided that assaying comprises DNA sequencing.
[0391] 71. The method of any of embodiments 57-70, further comprising measuring the level of TL1A in the subject.
[0392] 72. The method of any of embodiments 57-71, provided that the subject is homozygous for the genotype.
[0393] 73. The method of embodiments 57-72, wherein the genotype comprises at least two polymorphisms provided in Table 1 or Tables 10A-10E.
[0394] 74. The method of any of embodiments 57-73, wherein the genotype comprises at least three polymorphisms provided in Table 1 or Tables 10A-10E
[0395] 75. The method of any one of embodiments 57-74, wherein the genotype comprises at least one polymorphism comprising a non-reference allele.
[0396] 76. The method of any of embodiments 57-75, further comprising characterizing the at least one of the inflammatory, the fibrostenotic, and the fibrotic, disease or condition as Crohn's disease (CD) provided the genotype is present.
[0397] 77. The method of embodiment 76, provided that the CD comprises ileal, ileocolonic, or colonic CD.
[0398] 78. The method of any of embodiments 57-77, further comprising characterizing the at least one of the inflammatory, the fibrostenotic, and the fibrotic, disease or condition as a ulcerative colitis (UC), provided the genotype is present.
[0399] 79. The method of embodiment 78, provided that the fibrotic disease is medically refractory UC.
[0400] 80. The method of embodiments 57-79, comprising treating the subject with a therapeutic agent comprising an anti-TL1A antibody, anti-CD30L antibody, glucocorticosteroid, anti-TNF therapy, anti-a4-b7 therapy, anti-IL12p40 therapy, JAK inhibitor, thalidomide, or cyclophosphamide, or a combination thereof.
[0401] 81. The method of embodiment 80, wherein the therapeutic agent is an anti-TL1A antibody.
[0402] 82. The method of embodiment 81, wherein the anti-TL1A antibody is selected from Table 2C.
[0403] 83. The method of embodiment 81, wherein the anti-TL1A antibody comprises an amino acid sequence provided in any one of Tables 2A-2H.
[0404] 84. The method of embodiment 81, wherein the anti-TL1A antibody binds to the same region of human TL1A as a reference antibody selected from Table 2C.
[0405] 85. The method of embodiment 81, wherein the anti-TL1A antibody binds to the same region of human TL1A as a reference antibody, the reference antibody comprising an amino acid sequence provided in any one of Tables 2A-2H.
[0406] 86. The method of embodiments 80-85, wherein the anti-TL1A antibody is a neutralizing TL1A antibody.
[0407] 87. The method of embodiments 80-85, wherein the anti-TL1A antibody is an antagonist of TL1A.
[0408] 88. A method for detecting a genotype of interest in a subject comprising at least one of an inflammatory, a fibrostenotic, and a fibrotic, disease or condition, the method comprising:
   [0409] (a) contacting genetic material from the subject with a composition sufficiently complementary to and capable of hybridizing to the genotype of interest, the composition comprising:
      [0410] (i) a detectably labeled oligonucleotide probe comprising at least 10 contiguous nucleobases provided in any one of SEQ ID NOS: 2001-2031,
      [0411] (ii) a detectably labeled oligonucleotide probe comprising at least 10 contiguous nucleobases provided in any one of SEQ ID NOS: 2001-2031,
      [0412] (iii) a detectably labeled oligonucleotide probe comprising at least 10 contiguous nucleobases provided in any one of SEQ ID NOS: 2001-2031,
      [0413] (iv) a detectably labeled oligonucleotide probe comprising a nucleic acid sequence that differs from a probe selected from the group consisting of (i)-(iii) by up to three nucleobases, provided the detectably labeled oligonucleotide probe of (iv) hybridizes to the genotype of interest,
      [0414] (v) a detectably labeled oligonucleotide probe comprising a nucleic acid sequence complementary to a probe selected from the group consisting of (i)-(iv), or
      [0415] (vi) a combination of probes selected from the group consisting of (i)-(v),
      [0416] wherein the detectably labeled oligonucleotide probe of (i), (ii), and (iii) are different,
   [0417] (b) detecting the presence or absence of hybridization of the genetic material with the composition using the detectably labeled probe, whereby hybridization of the genetic material with the composition is indicative of the presence of the genotype of interest in the subject.
[0418] 89. The method of embodiment 88, provided that the presence of the genotype of interest is indicative of the subject comprising elevated levels of TL1A.
[0419] 90. The method of embodiment 88 or embodiment 89, provided that the inflammatory disease comprises Crohn's disease (CD).
[0420] 91. The method of embodiment 88, provided that the CD comprises ileal, ileocolonic, or colonic CD.
[0421] 92. The method of any of embodiments 88-91, provided that the inflammatory disease is ulcerative colitis (UC).
[0422] 93. A method of treating the at least one of an inflammatory disease, a fibrostenotic disease, in the subject of any one of embodiments 88-92, the method comprising:
   [0423] a) administering to the subject of any of embodiments 88-92 a therapeutically effective amount of a therapeutic agent, provided that the subject comprises the genotype of interest.
[0424] 94. The method of embodiment 93, wherein the therapeutic agent is an anti-TL1A antibody, anti-CD30L antibody, glucocorticosteroid, anti-TNF therapy, anti-a4-b7 therapy, anti-IL12p40 therapy, JAK inhibitor, thalidomide, or cyclophosphamide, or a combination thereof.
[0425] 95. The method of embodiment 94, provided that the therapeutic agent comprises an anti-TL1A ligand antibody or antigen binding fragment thereof.
[0426] 96. A composition comprising at least 10 but less than 50 contiguous nucleobase residues of any one of SEQ ID NOS: 2001-2031 or its complement, wherein the contiguous nucleobase residues comprise the nucleobase at position 501 of the any one of SEQ ID NOS: 2001-2031, and wherein the contiguous nucleobase residues are connected to a detectable molecule.
[0427] 97. The composition of embodiment 96, provided that the detectable molecule is a fluorophore.
[0428] 98. The composition of embodiments 96-97, wherein the contiguous nucleobase residues comprise the nucleobase at position 501 of any one of SEQ ID NOS: 2001-2031.
[0429] 99. The composition of embodiments 96-98, provided that the contiguous nucleobase residues are connected to a quencher.
[0430] 100. A kit comprising the composition of any of embodiments 96-99, and a primer pair capable of amplifying at least 15 contiguous nucleic acid molecules of any one of SEQ ID NOS: 2001-2031, the at least 15 contiguous nucleic acid molecules comprising the nucleic acid located at position 501 of any one of SEQ ID NOS: 2001-2031.
[0431] 101. A method comprising contacting DNA from a subject with the composition of any of embodiments 96-99 or the kit of any of embodiment 100 under conditions configured to hybridize the composition to the DNA if the DNA comprises a sequence complementary to the composition.
[0432] 102. A method comprising treating the subject of embodiment 101 with a therapeutic agent, provided that the DNA from the subject comprises the sequence complementary to the composition.
[0433] 103. The method of embodiment 102, wherein the therapeutic agent is an anti-TL1A antibody, anti-CD30L antibody, glucocorticosteroid, anti-TNF therapy, anti-a4-b7 therapy, anti-IL12p40 therapy, JAK inhibitor, thalidomide, or cyclophosphamide, or a combination thereof.
[0434] 104. The method of embodiment 103, wherein the therapeutic agent is an anti-TL1A antibody.
[0435] 105. A method of identifying a risk of developing a TL1A mediated disease or condition comprising at least one of an inflammatory, a fibrostenotic, and a fibrotic, disease or condition in a subject, the method comprising:
   [0436] a) assaying a sample obtained from the subject to identify the presence of a genotype comprising a polymorphism provided in Table 1 or Tables 10A-10E, or a polymorphism in linkage disequilibrium (LD) therewith; and
   [0437] b) identifying the risk of developing at least one of an inflammatory, a fibrostenotic, and a fibrotic, disease or condition in the subject, provided the presence of the genotype is identified in step (a).
[0438] 106. A method of selecting a subject for treatment, the method comprising:
   [0439] a) assaying a sample obtained from the subject to identify the presence of a genotype comprising a polymorphism provided in Table 1 or Tables 10A-10E, or a polymorphism in linkage disequilibrium (LD) therewith; and
   [0440] b) selecting the subject for treatment with a therapeutic agent, provided the presence of the genotype is identified in step (a).
[0441] 107. The method of any of embodiments 105-106, provided that the subject is homozygous for the genotype.
[0442] 108. The method of any of embodiments 105-107, wherein the genotype comprises at least two polymorphisms provided in Table 1 or Tables 10A-10E.
[0443] 109. The method of any of embodiments 105-108, wherein the genotype comprises at least three polymorphisms provided in Table 1 or Tables 10A-10E.
[0444] 110. The method of any of embodiments 105-109, wherein the genotype comprises at least one polymorphism comprising a non-reference allele.
[0445] 111. The method of embodiments 105-110, further comprising treating the subject by administering to the subject a therapeutically effective amount of a therapeutic agent.
[0446] 112. The method of embodiment 111, wherein the therapeutic agent is an anti-TL1A antibody, anti-CD30L antibody, glucocorticosteroid, anti-TNF therapy, anti-a4-b7 therapy, anti-IL12p40 therapy, JAK inhibitor, thalidomide, or cyclophosphamide, or a combination thereof.
[0447] 113. The method of embodiment 111, wherein the therapeutic agent is an anti-TL1A antibody.
[0448] 114. The method of embodiment 113, wherein the anti-TL1A antibody is selected from Table 2C.
[0449] 115. The method of embodiment 113, wherein the anti-TL1A antibody comprises an amino acid sequence provided in any one of Tables 2A-2H.
[0450] 116. The method of embodiment 113, wherein the anti-TL1A antibody binds to the same region of human TL1A as a reference antibody selected from Table 2C.
[0451] 117. The method of embodiment 113, wherein the anti-TL1A antibody binds to the same region of human TL1A as a reference antibody, the reference antibody comprising an amino acid sequence provided in any one of Tables 2A-2H.
[0452] 118. The method of embodiments 113-117, wherein the anti-TL1A antibody is a neutralizing TL1A antibody.
[0453] 119. The method of embodiments 113-117, wherein the anti-TL1A antibody is an antagonist of TL1A.
[0454] 120. The methods of any previous embodiment, comprising administering a therapeutically effective amount of an additional therapeutic agent to the subject.
[0455] 121. The method of embodiment 120, wherein the additional therapeutic agent is a modulator of Receptor Interacting Serine/Threonine Kinase 2 (RIPK2).
[0456] 122. The method of embodiment 120, wherein the additional therapeutic agent is a modulator of G Protein-Coupled Receptor 35 (GPR35).
[0457] 123. The method of embodiment 120, wherein the additional therapeutic agent is a modulator of CD30 ligand (CD30L) 124. The method of embodiment 123, wherein the modulator of CD30L comprises an amino acid sequence provided in Table 3.
[0458] 125. The method of embodiment 120, wherein the additional therapeutic agent comprises an anti-TL1A antibody, an anti-CD30L antibody, glucocorticosteroid, anti-TNF therapy, anti-a4-b7 therapy, anti-IL12p40 therapy, JAK inhibitor, thalidomide, or cyclophosphamide or a combination thereof.
[0459] 126. The method of embodiment 120, wherein the additional therapeutic agent comprises an anti-inflammatory drug, cortisone, colchicine, potassium iodine, steroid, hydroxychloroquine, cyclosporin A, thalidomide, or a combination thereof.
[0460] 127. The method of embodiment 120, wherein the additional therapeutic agent comprises a corticosteroid, ciclosporin, infliximab, canakinumab, clobetasol, mupirocin, gentamicin, tacrolimus, mycophenolate mofetil, or thalidomide, or a combination thereof.
[0461] 128. The method of embodiment 120, wherein the additional therapeutic agent comprises a steroid, retinoid, methotrexate, adalimumab, brodalumab, certolizumab pegol, guselkumab, infliximab, ixekizumab, risankizumab-rzaa, secukinumab, tildrakizumab, ustekinumab, or apremilast, or a combination thereof.
[0462] 129. The method of embodiment 120, wherein the additional therapeutic agent comprises a steroid, methotrexate, mycophenolate, sulfasalazine, azathioprine, cyclosporine, adalimumab, infliximab, daclizumab, abatacept, or rituximab, or a combination thereof.
[0463] 130. The method of embodiment 120, wherein the additional therapeutic agent comprises ursodeoxycholic acid (UDCA), antipruritic, cholestyramine, antibiotic, vitamin A, vitamin D, vitamin E, or vitamin K, or a combination thereof.
[0464] 131. The method of embodiment 120, wherein the additional therapeutic agent comprises methotrexate, leflunomide, hydroxychloroquine, sulfasalazine, a NSAID, TNF inhibitor, etanercept, infliximab, belimumab, rituximab, anakinra, tocilizumab, canakinumab, secukinumab, ustekinumab, ixekizumab sarilumab, tofacitinib, abatacept, corticosteroid, prednisone, cortisone, or a combination thereof.
[0465] 132. The method of embodiment 120, wherein the additional therapeutic agent comprises etanercept, adalimumab, infliximab, cyclobenzaprine, steroid, secukinumab, methotrexate, leflunomide hydroxychloroquine, or sulfasalazine, or a combination thereof.
[0466] 133. The method of any previous embodiment, wherein the subject has or is suspected of having an EIM of IBD.
[0467] 134. The method of any previous embodiment, wherein the subject is at risk for developing an EIM of IBD.
[0468] 135. The method of embodiment 133 or 134, wherein the EIM comprises ankylosing spondylitis and sacroiliitis.
[0469] 136. The method of embodiment 133 or 134, wherein the EIM comprises erythema nodosum, pyoderma gangrenosum, and/or psoriasis.
[0470] 137. The method of embodiment 133 or 134, wherein the EIM comprises the manifestation in the eye.
[0471] 138. The method of embodiment 137, wherein the manifestation in the eye comprises uveitis, iritis, episcleritis, scleritis, or undiagnosed ocular inflammation, or a combination thereof.
[0472] 139. The method of embodiment 133 or 134, wherein the EIM comprises primary sclerosing cholangitis.
[0473] 140. The method of embodiment 133 or 134, wherein the EIM comprises peripheral arthritis.
[0474] 141. The method of embodiment 133 or 134, wherein the arthritis comprises large joint arthritis, small joint arthritis, extracolonic arthritis, Crohn's disease/ulcerative colitis non-specific joint inflammation, or IBD-associated arthralgia complication, or a combination thereof.
[0475] 142. The method of embodiment 133 or 134, wherein the EIM comprises ankylosing spondylitis, sacroiliitis, erythema nodosum, pyoderma gangrenosum, psoriasis, a manifestation in the eye, or primary sclerosing cholangitis, or a combination thereof.
[0476] 143. The method of embodiment 133 or 134, wherein the EIM comprises ankylosing spondylitis, sacroiliitis, erythema nodosum, pyoderma gangrenosum, psoriasis, eye, peripheral arthritis, or primary sclerosing cholangitis, or a combination thereof.
[0477] 144. The method of any previous embodiment, wherein the subject comprises a serological marker selected from the group comprising anti-neutrophil cytoplasmic antibodies (ANCA), anti-Saccharomyces cerevisiae antibodies (ASCA), anti-outer member porin C (anti-OmpC), anti-Pseudomonas fluorescens bacterial sequence 12 (anti-I2), and anti-bacterial flagellin (CBir1).
[0478] 145. The method of any previous embodiment, wherein the subject has or is suspected of having an inflammatory bowel disease.
[0479] 146. The method of embodiment 145, wherein the inflammatory bowel disease comprises Crohn's disease.
[0480] 147. The method of embodiment 146, wherein the subject has a Crohn's disease (CD) phenotype selected from the group comprising upper GI, colonic, small bowel, structuring, penetrating, structuring and penetrating, and perianal CD.
[0481] 148. The method of embodiment 145, wherein the inflammatory bowel disease comprises ulcerative colitis.
[0482] 149. The method of any previous embodiment, wherein the subject has undergone surgery for treatment of the inflammatory bowel disease.
[0483] 150. The method of any previous embodiment, wherein the subject is female.
[0484] 151. The method of any one of embodiments 1-149, wherein the subject is male.
[0485] 152. The method of any previous embodiment, wherein the subject is Jewish.
[0486] 153. The method of any previous embodiment, wherein the subject is was diagnosed with inflammatory bowel disease before age 17.
[0487] 154. The method of any previous embodiment, wherein the subject is was diagnosed with inflammatory bowel disease before age 10.
[0488] 155. The method of any previous embodiment, wherein the subject is a smoker.
[0489] 156. The method of any previous embodiment, further comprising determining whether the subject comprises the one or more single nucleotide polymorphisms.

### Kits and Compositions

### Compositions

[0490] Disclosed herein are compositions useful for the detection of a genotype or biomarker in a sample obtained from a subject according to the methods described herein. Aspects disclosed herein provide compositions comprises a polynucleotide sequence comprising at least 10 but less than 50 contiguous nucleotides of any one of SEQ ID NOS: 2001-2031, or reverse complements thereof, wherein the contiguous polynucleotide sequence comprises a detectable molecule. In some embodiments, the polynucleotide sequence comprises the nucleobase at a nucleoposition indicated by the non-nucleic acid letter (e.g., S, R, V) in any one of SEQ ID NOS: 2001-2031. In various embodiments, the detectable molecule comprises a fluorophore. In other embodiments, the polynucleotide sequences further comprise a quencher.

[0491] Also disclosed herein are compositions comprising an antibody or antigen-binding fragment that specifically binds to a target protein described herein (e.g., TL1A) wherein the antibody or antigen-binding fragment comprises a detectable molecule. In various embodiments, the antibody comprises a monoclonal antibody, a chimeric antibody, a CDR-grafted antibody, a Fab, a Fab′, a F(ab′)₂, a Fv, a disulfide linked Fv, a scFv, a single domain antibody, a diabody, a multispecific antibody, a dual specific antibody, an anti-idiotypic antibody, or a bispecific antibody. In some embodiments, the antibody or antigen-binding fragment comprises an IgG antibody, an IgM antibody, and/or an IgE antibody. In some embodiments, the detectable molecule comprises a fluorophore. In some embodiments, the antibody or antigen-binding fragment is conjugated to a paramagnetic particle (e.g., bead).

### Kits

[0492] Disclosed herein, are kits useful for to detect the genotypes and/or biomarkers disclosed herein. In some embodiments, the kits disclosed herein may be used to diagnose and/or treat a disease or condition in a subject; or select a patient for treatment and/or monitor a treatment disclosed herein. In some embodiments, the kit comprises the compositions described herein, which can be used to perform the methods described herein. Kits comprise an assemblage of materials or components, including at least one of the compositions. Thus, in some embodiments the kit contains a composition including of the pharmaceutical composition, for the treatment of IBD. In other embodiments, the kits contains all of the components necessary and/or sufficient to perform an assay for detecting and measuring IBD markers, including all controls, directions for performing assays, and any necessary software for analysis and presentation of results.

[0493] In some instances, the kits described herein comprise components for detecting the presence, absence, and/or quantity of a target nucleic acid and/or protein described herein. In some embodiments, the kit further comprises components for detecting the presence, absence, and/or quantity of a serological marker described herein. In some embodiments, the kit comprises the compositions (e.g., primers, probes, antibodies) described herein. The disclosure provides kits suitable for assays such as enzyme-linked immunosorbent assay (ELISA), single-molecular array (Simoa), PCR, and qPCR. The exact nature of the components configured in the kit depends on its intended purpose.

[0494] In some embodiments, the kits described herein are configured for the purpose of treating and/or characterizing a disease or condition (e.g., Crohn's disease), or subclinical phenotype thereof (e.g., stricturing, penetrating, or stricturing and penetrating disease phenotypes) in a subject. In some embodiments, the kits described herein are configured for the purpose of identifying a subject suitable for treatment with a therapeutic agent (e.g., anti-TL1A antibody). In some embodiments, the kit is configured particularly for the purpose of treating mammalian subjects. In some embodiments, the kit is configured particularly for the purpose of treating human subjects. In further embodiments, the kit is configured for veterinary applications, treating subjects such as, but not limited to, farm animals, domestic animals, and laboratory animals. In some embodiments, the kit is configured to select a subject for a therapeutic agent, such as those disclosed herein. In some embodiments, the kit is configured to select a subject for treatment with a therapeutic agent disclosed herein. An exemplary therapeutic agent is an anti-TL1A antibody.

[0495] Instructions for use may be included in the kit. Optionally, the kit also contains other useful components, such as, diluents, buffers, pharmaceutically acceptable carriers, syringes, catheters, applicators, pipetting or measuring tools, bandaging materials or other useful paraphernalia. The materials or components assembled in the kit can be provided to the practitioner stored in any convenient and suitable ways that preserve their operability and utility. For example the components can be in dissolved, dehydrated, or lyophilized form; they can be provided at room, refrigerated or frozen temperatures. The components are typically contained in suitable packaging material(s). As employed herein, the phrase “packaging material” refers to one or more physical structures used to house the contents of the kit, such as compositions and the like. The packaging material is constructed by well-known methods, preferably to provide a sterile, contaminant-free environment. The packaging materials employed in the kit are those customarily utilized in gene expression assays and in the administration of treatments. As used herein, the term “package” refers to a suitable solid matrix or material such as glass, plastic, paper, foil, and the like, capable of holding the individual kit components. Thus, for example, a package can be a glass vial or prefilled syringes used to contain suitable quantities of the pharmaceutical composition. The packaging material has an external label which indicates the contents and/or purpose of the kit and its components.

### Systems

[0496] Disclosed herein are systems for identifying a subject as being suitable for treatment with a therapeutic agent (e.g., anti-TL1A antibody). In some embodiments, the systems described herein comprise kits and compositions for detecting the genotypes described herein in a biological sample of a subject. The system may comprise a computer system for implementing one or more methods of the disclosure, such as for example, receiving genotype data of a subject 201, inputting the genotype data into an algorithm to produce a EIM profile 202, and generating a report comprising the EIM profile of the subject 203, and displaying the report to a user on a graphical user interface 204, as shown in FIG. 2. A “EIM profile” as used herein refers to a profile of expression of one or more genotypes described herein in a subject that is detected in a biological sample obtained from the subject. In some embodiments, a EIM profile comprises a likelihood that a patient has or will develop an EIM.

### Computer Systems

[0497] FIG. 3 shows a computer system 301 that is programmed or otherwise configured to generate a EIM profile for a subject in need thereof. The computer system 301 can regulate various aspects of producing the EIM profile (e.g., receiving genotype data, generating a report with the EIM profile of the biological sample, and displaying the report to a user), of the present disclosure, such as, for example, by including permissions or encryption of genotype data and/or EIM profile of the subject to ensure patient privacy.

[0498] The computer system 301 can be an electronic device of a user or a computer system that is remotely located with respect to the electronic device. The electronic device can be a mobile electronic device, such as a mobile electronic device belonging to a physician.

[0499] The computer system 301 includes a central processing unit (CPU, also “processor” and “computer processor” herein) 305, which can be a single core or multi core processor, or a plurality of processors for parallel processing. The computer system 301 also includes memory or memory location 310 (e.g., random-access memory, read-only memory, flash memory), electronic storage unit 315 (e.g., hard disk), communication interface 320 (e.g., network adapter) for communicating with one or more other systems, and peripheral devices 325, such as cache, other memory, data storage and/or electronic display adapters. The memory 310, storage unit 315, interface 320 and peripheral devices 325 are in communication with the CPU 305 through a communication bus (solid lines), such as a motherboard. The storage unit 315 can be a data storage unit (or data repository) for storing data. The computer system 301 can be operatively coupled to a computer network (“network”) 330 with the aid of the communication interface 320. The network 330 can be the Internet, an internet and/or extranet, or an intranet and/or extranet that is in communication with the Internet. The network 330 in some cases is a telecommunication and/or data network. The network 330 can include one or more computer servers, which can enable distributed computing, such as cloud computing. The network 330, in some cases with the aid of the computer system 301, can implement a peer-to-peer network, which may enable devices coupled to the computer system 301 to behave as a client or a server.

[0500] The CPU 305 can execute a sequence of machine-readable instructions, which can be embodied in a program or software. The instructions may be stored in a memory location, such as the memory 310. The instructions can be directed to the CPU 305, which can subsequently program or otherwise configure the CPU 305 to implement methods of the present disclosure. Examples of operations performed by the CPU 305 can include fetch, decode, execute, and writeback.

[0501] The CPU 305 can be part of a circuit, such as an integrated circuit. One or more other components of the system 301 can be included in the circuit. In some cases, the circuit is an application specific integrated circuit (ASIC).

[0502] The storage unit 315 can store files, such as drivers, libraries and saved programs. The storage unit 315 can store user data, e.g., user preferences and user programs. The computer system 301 in some cases can include one or more additional data storage units that are external to the computer system 301, such as located on a remote server that is in communication with the computer system 301 through an intranet or the Internet.

[0503] The computer system 301 can communicate with one or more remote computer systems through the network 330. For instance, the computer system 301 can communicate with a remote computer system of a user. Examples of remote computer systems include personal computers (e.g., portable PC), slate or tablet PC's (e.g., Apple® iPad, Samsung® Galaxy Tab), telephones, Smart phones (e.g., Apple® iPhone, Android-enabled device, Blackberry®), or personal digital assistants. The user can access the computer system 301 via the network 330.

[0504] Methods as described herein can be implemented by way of machine (e.g., computer processor) executable code stored on an electronic storage location of the computer system 301, such as, for example, on the memory 310 or electronic storage unit 315. The machine executable or machine readable code can be provided in the form of software. During use, the code can be executed by the processor 305. In some cases, the code can be retrieved from the storage unit 315 and stored on the memory 310 for ready access by the processor 305. In some situations, the electronic storage unit 315 can be precluded, and machine-executable instructions are stored on memory 310.

[0505] The code can be pre-compiled and configured for use with a machine having a processer adapted to execute the code, or can be compiled during runtime. The code can be supplied in a programming language that can be selected to enable the code to execute in a pre-compiled or as-compiled fashion.

[0506] Aspects of the systems and methods provided herein, such as the computer system 301, can be embodied in programming. Various aspects of the technology may be thought of as “products” or “articles of manufacture” typically in the form of machine (or processor) executable code and/or associated data that is carried on or embodied in a type of machine readable medium. Machine-executable code can be stored on an electronic storage unit, such as memory (e.g., read-only memory, random-access memory, flash memory) or a hard disk. “Storage” type media can include any or all of the tangible memory of the computers, processors or the like, or associated modules thereof, such as various semiconductor memories, tape drives, disk drives and the like, which may provide non-transitory storage at any time for the software programming. All or portions of the software may at times be communicated through the Internet or various other telecommunication networks. Such communications, for example, may enable loading of the software from one computer or processor into another, for example, from a management server or host computer into the computer platform of an application server. Thus, another type of media that may bear the software elements includes optical, electrical and electromagnetic waves, such as used across physical interfaces between local devices, through wired and optical landline networks and over various air-links. The physical elements that carry such waves, such as wired or wireless links, optical links or the like, also may be considered as media bearing the software. As used herein, unless restricted to non-transitory, tangible “storage” media, terms such as computer or machine “readable medium” refer to any medium that participates in providing instructions to a processor for execution.

[0507] Hence, a machine readable medium, such as computer-executable code, may take many forms, including but not limited to, a tangible storage medium, a carrier wave medium or physical transmission medium. Non-volatile storage media include, for example, optical or magnetic disks, such as any of the storage devices in any computer(s) or the like, such as may be used to implement the databases, etc. shown in the drawings. Volatile storage media include dynamic memory, such as main memory of such a computer platform. Tangible transmission media include coaxial cables; copper wire and fiber optics, including the wires that comprise a bus within a computer system. Carrier-wave transmission media may take the form of electric or electromagnetic signals, or acoustic or light waves such as those generated during radio frequency (RF) and infrared (IR) data communications. Common forms of computer-readable media therefore include for example: a floppy disk, a flexible disk, hard disk, magnetic tape, any other magnetic medium, a CD-ROM, DVD or DVD-ROM, any other optical medium, punch cards paper tape, any other physical storage medium with patterns of holes, a RAM, a ROM, a PROM and EPROM, a FLASH-EPROM, any other memory chip or cartridge, a carrier wave transporting data or instructions, cables or links transporting such a carrier wave, or any other medium from which a computer may read programming code and/or data. Many of these forms of computer readable media may be involved in carrying one or more sequences of one or more instructions to a processor for execution.

[0508] The computer system 301 can include or be in communication with an electronic display 335 that comprises a user interface (UI) 340 for providing, for example, a report comprising the EIM profile of the subject or other relevant clinical information for purposes of informing a selection of a therapeutic agent (e.g., anti-TL1A antibody) to treat a disease or condition of the subject described herein. Examples of UI's include, without limitation, a graphical user interface (GUI) and web-based user interface.

[0509] Methods and systems of the present disclosure can be implemented by way of one or more algorithms. An algorithm can be implemented by way of software upon execution by the central processing unit 305. The algorithm can, for example, perform: (a) receiving genotype data of a subject 401, (b) determining whether the genotypes are heterozygous or homozygous for at least one polymorphisms 402, (c) generating an outcome using predetermined parameters 403, and (d) displaying the outcome to a user (e.g., physician) on a user interface of an electronic device 404, as shown in FIG. 4. In some embodiments, the outcome is positive, negative or indeterminate. In some embodiments, the predetermined parameters are genotype combinations known to be predictive of a therapeutic response to a treatment, such as with a therapeutic agent.

### Web Application

[0510] In some embodiments, the computer system comprises software for a web application. In light of the disclosure provided herein, those of skill in the art will recognize that a web application may utilize one or more software frameworks and one or more database systems. A web application, for example, is created upon a software framework such as Microsoft® NET or Ruby on Rails (RoR). A web application, in some instances, utilizes one or more database systems including, by way of non-limiting examples, relational, non-relational, feature oriented, associative, and XML database systems. Suitable relational database systems include, by way of non-limiting examples, Microsoft® SQL Server, mySQL™, and Oracle®. Those of skill in the art will also recognize that a web application may be written in one or more versions of one or more languages. In some embodiments, a web application is written in one or more markup languages, presentation definition languages, client-side scripting languages, server-side coding languages, database query languages, or combinations thereof. In some embodiments, a web application is written to some extent in a markup language such as Hypertext Markup Language (HTML), Extensible Hypertext Markup Language (XHTML), or eXtensible Markup Language (XML). In some embodiments, a web application is written to some extent in a presentation definition language such as Cascading Style Sheets (CSS). In some embodiments, a web application is written to some extent in a client-side scripting language such as Asynchronous Javascript and XML (AJAX), Flash® Actionscript, Javascript, or Silverlight®. In some embodiments, a web application is written to some extent in a server-side coding language such as Active Server Pages (ASP), ColdFusion®, Perl, Java™, JavaServer Pages (JSP), Hypertext Preprocessor (PUP), Python™, Ruby, Tcl, Smalltalk, WebDNA®, or Groovy. In some embodiments, a web application is written to some extent in a database query language such as Structured Query Language (SQL). A web application may integrate enterprise server products such as IBM® Lotus Domino®. A web application may include a media player element. A media player element may utilize one or more of many suitable multimedia technologies including, by way of non-limiting examples, Adobe® Flash®, HTML 5, Apple® QuickTime®, Microsoft® Silverlight®, Java™, and Unity®.

### Mobile Application

[0511] In some embodiments, the computer system comprises software for a mobile application. The mobile application may be provided to a mobile digital processing device at the time it is manufactured. The mobile application may be provided to a mobile digital processing device via the computer network described herein.

[0512] A mobile application is created by techniques known to those of skill in the art using hardware, languages, and development environments known to the art. Those of skill in the art will recognize that mobile applications may be written in several languages. Suitable programming languages include, by way of non-limiting examples, C, C++, C#, Featureive-C, Java™, Javascript, Pascal, Feature Pascal, Python™, Ruby, VB.NET, WML, and XHTML/HTML with or without CSS, or combinations thereof.

[0513] Suitable mobile application development environments are available from several sources. Commercially available development environments include, by way of non-limiting examples, AirplaySDK, alcheMo, Appcelerator®, Celsius, Bedrock, Flash Lite, NET Compact Framework, Rhomobile, and WorkLight Mobile Platform. Other development environments may be available without cost including, by way of non-limiting examples, Lazarus, MobiFlex, MoSync, and Phonegap. Also, mobile device manufacturers distribute software developer kits including, by way of non-limiting examples, iPhone and iPad (iOS) SDK, Android™ SDK, BlackBerry® SDK, BREW SDK, Palm® OS SDK, Symbian SDK, webOS SDK, and Windows® Mobile SDK.

[0514] Those of skill in the art will recognize that several commercial forums are available for distribution of mobile applications including, by way of non-limiting examples, Apple® App Store, Android™ Market, BlackBerry® App World, App Store for Palm devices, App Catalog for webOS, Windows® Marketplace for Mobile, Ovi Store for Nokia® devices, Samsung® Apps, and Nintendo® DSi Shop.

### Standalone Application

[0515] In some embodiments, the computer system comprises software a standalone application, which is a program that may be run as an independent computer process, not an add-on to an existing process, e.g., not a plug-in. Those of skill in the art will recognize that standalone applications are sometimes compiled. In some instances, a compiler is a computer program(s) that transforms source code written in a programming language into binary feature code such as assembly language or machine code. Suitable compiled programming languages include, by way of non-limiting examples, C, C++, Featureive-C, COBOL, Delphi, Eiffel, Java™, Lisp, Python™, Visual Basic, and VB .NET, or combinations thereof. Compilation may be often performed, at least in part, to create an executable program. In some instances, a computer program includes one or more executable complied applications.

### Web Browser Plug-In

[0516] In some embodiments, the computer system comprises software that comprises a web browser plug-in. In computing, a plug-in, in some instances, is one or more software components that add specific functionality to a larger software application. Makers of software applications may support plug-ins to enable third-party developers to create abilities which extend an application, to support easily adding new features, and to reduce the size of an application. When supported, plug-ins enable customizing the functionality of a software application. For example, plug-ins are commonly used in web browsers to play video, generate interactivity, scan for viruses, and display particular file types. Those of skill in the art will be familiar with several web browser plug-ins including, Adobe® Flash® Player, Microsoft® Silverlight®, and Apple® QuickTime®. The toolbar may comprise one or more web browser extensions, add-ins, or add-ons. The toolbar may comprise one or more explorer bars, tool bands, or desk bands.

[0517] In view of the disclosure provided herein, those of skill in the art will recognize that several plug-in frameworks are available that enable development of plug-ins in various programming languages, including, by way of non-limiting examples, C++, Delphi, Java™ PHP, Python™, and VB .NET, or combinations thereof.

[0518] In some embodiments, Web browsers (also called Internet browsers) are software applications, designed for use with network-connected digital processing devices, for retrieving, presenting, and traversing information resources on the World Wide Web. Suitable web browsers include, by way of non-limiting examples, Microsoft® Internet Explorer®, Mozilla® Firefox®, Google® Chrome, Apple® Safari®, Opera Software® Opera®, and KDE Konqueror. The web browser, in some instances, is a mobile web browser. Mobile web browsers (also called microbrowsers, mini-browsers, and wireless browsers) may be designed for use on mobile digital processing devices including, by way of non-limiting examples, handheld computers, tablet computers, netbook computers, subnotebook computers, smartphones, music players, personal digital assistants (PDAs), and handheld video game systems. Suitable mobile web browsers include, by way of non-limiting examples, Google® Android® browser, RIM BlackBerry® Browser, Apple® Safari®, Palm® Blazer, Palm® WebOS® Browser, Mozilla® Firefox® for mobile, Microsoft® Internet Explorer® Mobile, Amazon® Kindle® Basic Web, Nokia® Browser, Opera Software® Opera® Mobile, and Sony® PSP™ browser.

### Software Modules

[0519] The medium, method, and system disclosed herein comprise one or more softwares, servers, and database modules, or use of the same. In view of the disclosure provided herein, software modules may be created by techniques known to those of skill in the art using machines, software, and languages known to the art. The software modules disclosed herein may be implemented in a multitude of ways. In some embodiments, a software module comprises a file, a section of code, a programming feature, a programming structure, or combinations thereof. A software module may comprise a plurality of files, a plurality of sections of code, a plurality of programming features, a plurality of programming structures, or combinations thereof. By way of non-limiting examples, the one or more software modules comprise a web application, a mobile application, and/or a standalone application. Software modules may be in one computer program or application. Software modules may be in more than one computer program or application. Software modules may be hosted on one machine. Software modules may be hosted on more than one machine. Software modules may be hosted on cloud computing platforms. Software modules may be hosted on one or more machines in one location. Software modules may be hosted on one or more machines in more than one location.

### Databases

[0520] The medium, method, and system disclosed herein comprise one or more databases, or use of the same. In view of the disclosure provided herein, those of skill in the art will recognize that many databases are suitable for storage and retrieval of geologic profile, operator activities, division of interest, and/or contact information of royalty owners. Suitable databases include, by way of non-limiting examples, relational databases, non-relational databases, feature oriented databases, feature databases, entity-relationship model databases, associative databases, and XML databases. In some embodiments, a database is internet-based. In some embodiments, a database is web-based. In some embodiments, a database is cloud computing-based. A database may be based on one or more local computer storage devices.

### Data Transmission

[0521] The subject matter described herein, including methods for producing a EIM profile are configured to be performed in one or more facilities at one or more locations. Facility locations are not limited by country and include any country or territory. In some instances, one or more steps are performed in a different country than another step of the method. In some instances, one or more steps for obtaining a sample are performed in a different country than one or more steps for detecting the presence or absence of a genotype in a biological sample. In some embodiments, one or more method steps involving a computer system are performed in a different country than another step of the methods provided herein. In some embodiments, data processing and analyses are performed in a different country or location than one or more steps of the methods described herein. In some embodiments, one or more articles, products, or data are transferred from one or more of the facilities to one or more different facilities for analysis or further analysis. An article includes, but is not limited to, one or more components obtained from a subject, e.g., processed cellular material. Processed cellular material includes, but is not limited to, cDNA reverse transcribed from RNA, amplified RNA, amplified cDNA, sequenced DNA, isolated and/or purified RNA, isolated and/or purified DNA, and isolated and/or purified polypeptide. Data includes, but is not limited to, information regarding the stratification of a subject, and any data produced by the methods disclosed herein. In some embodiments of the methods and systems described herein, the analysis is performed and a subsequent data transmission step will convey or transmit the results of the analysis.

[0522] In some embodiments, any step of any method described herein is performed by a software program or module on a computer. In additional or further embodiments, data from any step of any method described herein is transferred to and from facilities located within the same or different countries, including analysis performed in one facility in a particular location and the data shipped to another location or directly to an individual in the same or a different country. In additional or further embodiments, data from any step of any method described herein is transferred to and/or received from a facility located within the same or different countries, including analysis of a data input, such as genetic or processed cellular material, performed in one facility in a particular location and corresponding data transmitted to another location, or directly to an individual, such as data related to the diagnosis, prognosis, responsiveness to therapy (e.g., anti-TL1A therapy), or the like, in the same or different location or country.

### Business Methods Utilizing a Computer

[0523] The methods described herein may utilize one or more computers. The computer may be used for managing customer and biological sample information such as sample or customer tracking, database management, analyzing molecular profiling data, analyzing cytological data, storing data, billing, marketing, reporting results, storing results, or a combination thereof. The computer may include a monitor or other user interface for displaying data, results, billing information, marketing information (e.g. demographics), customer information, or sample information. The computer may also include means for data or information input. The computer may include a processing unit and fixed or removable media or a combination thereof. The computer may be accessed by a user in physical proximity to the computer, for example via a keyboard and/or mouse, or by a user that does not necessarily have access to the physical computer through a communication medium such as a modem, an internet connection, a telephone connection, or a wired or wireless communication signal carrier wave. In some cases, the computer may be connected to a server or other communication device for relaying information from a user to the computer or from the computer to a user. In some cases, the user may store data or information obtained from the computer through a communication medium on media, such as removable media. It is envisioned that data relating to the methods can be transmitted over such networks or connections for reception and/or review by a party. The receiving party can be but is not limited to an individual, a health care provider (e.g., physician) or a health care manager. In one embodiment, a computer-readable medium includes a medium suitable for transmission of a result of an analysis of a biological sample, such as exosome bio-signatures. The medium can include a result regarding an exosome bio-signature of a subject, wherein such a result is derived using the methods described herein.

[0524] The entity obtaining a report with the EIM profile may enter biological sample information into a database for the purpose of one or more of the following: inventory tracking, assay result tracking, order tracking, customer management, customer service, billing, and sales. Sample information may include, but is not limited to: customer name, unique customer identification, customer associated medical professional, indicated assay or assays, assay results, adequacy status, indicated adequacy tests, medical history of the individual, preliminary diagnosis, suspected diagnosis, sample history, insurance provider, medical provider, third party testing center or any information suitable for storage in a database. Sample history may include but is not limited to: age of the sample, type of sample, method of acquisition, method of storage, or method of transport.

[0525] The database may be accessible by a customer, medical professional, insurance provider, or other third party. Database access may take the form of electronic communication such as a computer or telephone. The database may be accessed through an intermediary such as a customer service representative, business representative, consultant, independent testing center, or medical professional. The availability or degree of database access or sample information, such as assay results, may change upon payment of a fee for products and services rendered or to be rendered. The degree of database access or sample information may be restricted to comply with generally accepted or legal requirements for patient or customer confidentiality.

### Exemplary Embodiments

[0526] Among the exemplary embodiments are:
[0527] 1. A computer system for evaluating a sample from a subject, the system comprising:
   [0528] a) a central computing environment;
   [0529] b) an input device operatively connected to said central computing environment, wherein said input device is configured to receive a presence or absence of a genotype that correlates with a disease state in the sample;
   [0530] c) a trained algorithm executed by said central computing environment, wherein the trained algorithm is configured to use the presence or absence of the genotype to classify said sample as at least one of (i) a disease or normal sample, and (ii) a likelihood that a subject has or will develop an EIM; and
   [0531] d) an output device operatively connected to said central computing environment, wherein said output device is configured to provide information on the classification to a user.
[0532] 2. The computer system of embodiment 1, wherein the disease state comprises at least one of an inflammatory, a fibrostenotic, and a fibrotic, disease or condition.
[0533] 3. The computer system of embodiment 1 or embodiment 2, wherein the disease state is a TL1A mediated disease state selected from the group consisting of inflammatory bowel disease (IBD), Crohn's disease (CD), obstructive CD, ulcerative colitis (UC), intestinal fibrosis, intestinal fibrostenosis, rheumatoid arthritis, and primary sclerosing cholangitis.
[0534] 4. The computer system of any previous embodiment, wherein the sample comprises whole blood, plasma, serum, or tissue.
[0535] 5. The computer system of any previous embodiment, wherein the genotype comprises at least one polymorphism selected from Table 1 or Tables 10A-10E, a polymorphism in linkage disequilibrium (LD) therewith, and any combination thereof.
[0536] 6. The computer system of any previous embodiment, wherein the genotype comprises at least one polymorphism comprising a non-reference allele.
[0537] 7. The computer system of any previous embodiment, wherein the genotype comprises at least two polymorphisms provided in Table 1 or Tables 10A-10E.
[0538] 8. The computer system of any previous embodiment, wherein the genotype comprises at least three polymorphisms provided in Table 1 or Tables 10A-10E.
[0539] 9. The computer system of any previous embodiment, further comprising the genotype is homozygous.
[0540] 10. The computer system of embodiment 5-9, where LD is defined by an r² value of at least 0.80, 0.85, 0.90, 0.95, or 1.0.
[0541] 11. The computer system of any previous embodiment, wherein the genotype is associated with a risk that a subject has, or will develop, the disease state by a P value of at most about 1.0×10⁻⁶, about 1.0×10⁻⁷, about 1.0×10⁻⁸, about 1.0×10⁻⁹, about 1.0×10⁻¹⁰, about 1.0×10⁻²⁰, about 1.0×10⁻³⁰, about 1.0×10⁻⁴⁰, about 1.0×10⁻⁵⁰, about 1.0×10⁻⁶⁰, about 1.0×10⁻⁷⁰, about 1.0×10⁻⁸⁰, about 1.0×10⁻⁹⁰, or about 1.0×10⁻¹⁰⁰.
[0542] 12. The computer system of any previous embodiment, wherein said output device provides a report summarizing said information on said classification.
[0543] 13. The computer system of any previous embodiment, wherein said report comprises a recommendation for treatment of said disease state.
[0544] 14. The computer system of embodiment 13, wherein the treatment comprises administration of a therapeutic agent.
[0545] 15. The computer system of embodiment 14, wherein the therapeutic agent comprises an antibody or antigen-binding fragment, peptide, or small molecule.
[0546] 16. The computer system of any preceding embodiment, wherein said genotype is determined with an assay comprising polymerase chain reaction (PCR), quantitative reverse-transcription PCR (qPCR), automated sequencing, genotype array, or a combination thereof.
[0547] 17. Use of a composition comprising one or more binding agents for generating a report that classifies a sample from a subject as at least one of (i) a disease or non-disease state and (ii) a likelihood that a patient has or will develop an EIM, wherein the one or more binding agents specifically bind to a risk allele provided in Table 1 corresponding to a polymorphism provided in Table 1, their compliment, a polymorphism in linkage disequilibrium therewith, and any combination thereof.
[0548] 18. The use of embodiment 17, wherein generating the report further comprises:
   [0549] a) providing the sample from the subject;
   [0550] b) assaying the sample from the subject for detecting the presence of the risk allele corresponding to the polymorphism provided in Table 1;
   [0551] c) generating the report based on the result of step (b); and
   [0552] d) determining whether said subject has or is likely to develop an EIM based on the results of step (b).
[0553] 19. The use of embodiment 17 or 18, wherein the disease state comprises at least one of an inflammatory, a fibrostenotic, and a fibrotic, disease or condition.
[0554] 20. The use of embodiment 17-19, wherein the disease state is a TL1A-mediated disease state selected from the group consisting of inflammatory bowel disease (IBD), Crohn's disease (CD), obstructive CD, ulcerative colitis (UC), intestinal fibrosis, intestinal fibrostenosis, and primary sclerosing cholangitis.
[0555] 21. The use of any of embodiments 17-20, wherein the sample comprises whole blood, plasma, serum, or tissue.
[0556] 22. The use of embodiment 18, wherein assaying the sample from the subject for detecting the presence of the risk allele corresponding to the polymorphism provided in Table 1 of step (b) comprises:
   [0557] a) contacting the sample with the one or more binding agents that specifically bind to at least 10 contiguous nucleobases that includes the risk allele provided in any one of SEQ ID NOS: 2001-2031; and
   [0558] b) determining whether the sample specifically binds to said one or more binding agents, wherein binding of the sample to the one or more binding agents indicates the presence of the polymorphism in the subject.
[0559] 23. The use of embodiment 18, wherein assaying the sample from the subject for detecting the presence of the risk allele corresponding to the polymorphism provided in Table 1 of step (b) comprises sequencing of the sample.
[0560] 24. The use of embodiment 18, wherein assaying the sample from the subject for detecting the presence of the one or more polymorphisms of step (b) comprises quantifying the amount of DNA comprising the risk allele.
[0561] 25. The use of embodiment 24, wherein the quantifying comprises PCR.
[0562] 26. The use of embodiment 25, wherein the PCR comprises real-time PCR.
[0563] 27. The use of embodiment 24, wherein the quantifying comprises hybridization.
[0564] 28. A composition comprising one or more binding agents that specifically bind to a risk allele corresponding to a polymorphism provided in Table 1, wherein the one or more binding agents are selected to classify a sample as at least one of (i) a disease or non-disease or a disease state and (ii) a likelihood that a patient has or will develop an EIM.
[0565] 29. The composition of embodiment 28, wherein the one or more binding agents comprise oligonucleotides.
[0566] 30. The composition of embodiment 29, wherein the oligonucleotides comprise RNA or DNA.
[0567] 31. The composition of embodiment 29, wherein the one or more binding agents comprise aptamers, antibodies, peptide nucleic acids, or pyranosyl RNA.
[0568] 32. A kit for detecting at least one of an inflammatory, a fibrostenotic, and a fibrotic, disease or condition in a subject, the kit comprising:
   [0569] a) at least one binding agent that specifically binds to at least 10 contiguous nucleic acid molecules provided in any one of SEQ ID NOS: 2001-2031 including a corresponding risk allele provided in Table 1, or their complement, wherein the at least one binding agent is selected to detect at least one of (i) a disease or non-disease state and (ii) likelihood that a patient has or will develop an EIM; and
   [0570] b) reagents for detecting binding of said at least one binding agent to a DNA sample from a subject.
[0571] 33. The kit of embodiment 32, wherein the at least one binding agent comprises at least one oligonucleotide.
[0572] 34. The kit of embodiment 32, wherein the at least one binding agent comprises at least one aptamer, antibody, peptide nucleic acid, or pyranosyl RNA.
[0573] 35. The kit of embodiment 32-34, wherein the at least one binding agent is labelled with a detectable label.
[0574] 36. The kit of embodiment 32-35 wherein the at least one binding agent is immobilized to a surface.
[0575] 37. A system for generating a report that classifies a sample a disease or non-disease of a disease state, comprising:
   [0576] a) a computer system that:
      [0577] i. generates a molecular profile of a DNA sample based upon the presence of at least one polymorphism, or their complement; and
      [0578] ii. generates a report that classifies the sample based on said molecular profile; and
   [0579] b) a computer screen that displays said report.
[0580] 38. The system of embodiment 37, wherein the presence of the at least one polymorphism is based on the result of an assay of said DNA sample, which result is entered into a database.
[0581] 39. The system of embodiment 37-38, further comprising an input for said result.
[0582] 40. The system of claim 37-39, wherein the at least one polymorphism is selected from Table 1.
[0583] 41. The system of claim 37-41, wherein the at least one polymorphism comprises a non-reference allele.
[0584] 42. The system of claim 41, wherein the at least one polymorphism is two polymorphisms.
[0585] 43. The system of claim 41, wherein the at least one polymorphism is three polymorphisms.
[0586] 44. Use of a composition comprising an inhibitor of TL1A for treating a subject, provided the subject is a carrier of a genotype comprising a polymorphism provided in Table 1 or Tables 10A-10E.
[0587] 45. The use of embodiment 44, wherein the therapeutic agent comprises an anti-TL1A antibody, anti-CD30L antibody, glucocorticosteroid, anti-TNF therapy, anti-a4-b7 therapy, anti-IL12p40 therapy, JAK inhibitor, thalidomide, or cyclophosphamide, or a combination thereof.
[0588] 46. The use of embodiment 44, wherein the therapeutic agent is an anti-TL1A antibody.
[0589] 47. The use of embodiment 46, wherein the anti-TL1A antibody is selected from Table 2C.
[0590] 48. The use of embodiment 46, wherein the anti-TL1A antibody comprises an amino acid sequence provided in any one of Tables 2A-2H.
[0591] 49. The use of embodiment 46, wherein the anti-TL1A antibody binds to the same region of human TL1A as a reference antibody selected from Table 2C.
[0592] 50. The use of embodiment 46, wherein the anti-TL1A antibody binds to the same region of human TL1A as a reference antibody, the reference antibody comprising an amino acid sequence provided in any one of Tables 2A-2H.
[0593] 51. The use of embodiments 46-50, wherein the anti-TL1A antibody is a neutralizing TL1A antibody.
[0594] 52. The use of embodiments 46-50, wherein the anti-TL1A antibody is an antagonist of TL1A.
[0595] 53. The use of embodiments 44-52, wherein the genotype comprises at least two polymorphisms provided in Table 1 or Tables 10A-10E.
[0596] 54. The use of embodiments 44-53, wherein the genotype comprises at least three polymorphisms provided in Table 1 or Tables 10A-10E.
[0597] 55. The method of use of embodiments 44-55, wherein the genotype comprises at least one polymorphism comprising a non-reference allele.
[0598] 56. The computer system of embodiments 1-16, wherein said trained algorithm is configured to classify said sample as likely to have or develop an EIM with a positive predictive value of at least or about 50%, 55%, 60%, 65%, 70%, 75%, 80%, 85%, 90%, 91%, 92%, 93%, 94% 95%, 96%, 97%, 98%, 99%, or 100%.
[0599] 57. The computer system of embodiments 1-16, wherein said trained algorithm is configured to classify said sample as likely to have or develop an EIM with a specificity of at least or about 50%, 55%, 60%, 65%, 70%, 75%, 80%, 85%, 90%, 91%, 92%, 93%, 94% 95%, 96%, 97%, 98%, 99%, or 100%.

### Definitions

[0600] Unless defined otherwise, all terms of art, notations and other technical and scientific terms or terminology used herein are intended to have the same meaning as is commonly understood by one of ordinary skill in the art to which the claimed subject matter pertains. In some cases, terms with commonly understood meanings are defined herein for clarity and/or for ready reference, and the inclusion of such definitions herein should not necessarily be construed to represent a substantial difference over what is generally understood in the art.

[0601] Throughout this application, various embodiments may be presented in a range format. It should be understood that the description in range format is merely for convenience and brevity and should not be construed as an inflexible limitation on the scope of the disclosure. Accordingly, the description of a range should be considered to have specifically disclosed all the possible subranges as well as individual numerical values within that range. For example, description of a range such as from 1 to 6 should be considered to have specifically disclosed subranges such as from 1 to 3, from 1 to 4, from 1 to 5, from 2 to 4, from 2 to 6, from 3 to 6 etc., as well as individual numbers within that range, for example, 1, 2, 3, 4, 5, and 6. This applies regardless of the breadth of the range.

[0602] As used in the specification and claims, the singular forms “a”, “an” and “the” include plural references unless the context clearly dictates otherwise. For example, the term “a sample” includes a plurality of samples, including mixtures thereof.

[0603] The terms “determining,” “measuring,” “evaluating,” “assessing,” “assaying,” and “analyzing” are often used interchangeably herein to refer to forms of measurement. The terms include determining if an element is present or not (for example, detection). These terms can include quantitative, qualitative or quantitative and qualitative determinations. Assessing can be relative or absolute. “Detecting the presence of” can include determining the amount of something present in addition to determining whether it is present or absent depending on the context.

[0604] The term “in vivo” is used to describe an event that takes place in a subject's body.

[0605] The term “ex vivo” is used to describe an event that takes place outside of a subject's body. An ex vivo assay is not performed on a subject. Rather, it is performed upon a sample separate from a subject. An example of an ex vivo assay performed on a sample is an “in vitro” assay.

[0606] The term “in vitro” is used to describe an event that takes places contained in a container for holding laboratory reagent such that it is separated from the biological source from which the material is obtained. In vitro assays can encompass cell-based assays in which living or dead cells are employed. In vitro assays can also encompass a cell-free assay in which no intact cells are employed.

[0607] As used herein, the term “about” a number refers to that number plus or minus 10% of that number. The term “about” a range refers to that range minus 10% of its lowest value and plus 10% of its greatest value.

[0608] As used herein, the terms “homologous,” “homology,” or “percent homology” when used herein to describe to an amino acid sequence or a nucleic acid sequence, relative to a reference sequence, can be determined using the formula described by Karlin and Altschul (Proc. Natl. Acad. Sci. USA 87: 2264-2268, 1990, modified as in Proc. Natl. Acad. Sci. USA 90:5873-5877, 1993). Such a formula is incorporated into the basic local alignment search tool (BLAST) programs of Altschul et al. (J Mol Biol. 1990 Oct. 5; 215(3):403-10; Nucleic Acids Res. 1997 Sep. 1; 25(17):3389-402). Percent homology of sequences can be determined using the most recent version of BLAST, as of the filing date of this application. Percent identity of sequences can be determined using the most recent version of BLAST, as of the filing date of this application.

[0609] The terms “increased,” or “increase” are used herein to generally mean an increase by a statically significant amount. In some embodiments, the terms “increased,” or “increase,” mean an increase of at least 10% as compared to a reference level, for example an increase of at least about 10%, at least about 20%, or at least about 30%, or at least about 40%, or at least about 50%, or at least about 60%, or at least about 70%, or at least about 80%, or at least about 90% or up to and including a 100% increase or any increase between 10-100% as compared to a reference level, standard, or control. Other examples of “increase” include an increase of at least 2-fold, at least 5-fold, at least 10-fold, at least 20-fold, at least 50-fold, at least 100-fold, at least 1000-fold or more as compared to a reference level. An increase can be an absolute amount (e.g., level of protein expression), or a rate of production (e.g., rate of protein expression between two points in time).

[0610] The terms, “decreased” or “decrease” are used herein generally to mean a decrease by a statistically significant amount. In some embodiments, “decreased” or “decrease” means a reduction by at least 10% as compared to a reference level, for example a decrease by at least about 20%, or at least about 30%, or at least about 40%, or at least about 50%, or at least about 60%, or at least about 70%, or at least about 80%, or at least about 90% or up to and including a 100% decrease (e.g., absent level or non-detectable level as compared to a reference level), or any decrease between 10-100% as compared to a reference level. In the context of a marker or symptom, by these terms is meant a statistically significant decrease in such level. The decrease can be, for example, at least 10%, at least 20%, at least 30%, at least 40% or more, and is preferably down to a level accepted as within the range of normal for an individual without a given disease. Other examples of “decrease” include a decrease of at least 2-fold, at least 5-fold, at least 10-fold, at least 20-fold, at least 50-fold, at least 100-fold, at least 1000-fold or more as compared to a reference level. A decrease can be an absolute amount (e.g., level of protein expression), or a rate of production (e.g., rate of protein expression between two points in time).

[0611] The terms “subject” encompass mammals. Non-limiting examples of mammal include, any member of the mammalian class: humans, non-human primates such as chimpanzees, and other apes and monkey species; farm animals such as cattle, horses, sheep, goats, swine; domestic animals such as rabbits, dogs, and cats; laboratory animals including rodents, such as rats, mice and guinea pigs, and the like. In one aspect, the mammal is a human. The term “animal” as used herein comprises human beings and non-human animals. In one embodiment, a “non-human animal” is a mammal, for example a rodent such as rat or a mouse. In some instances, a human subject is a “patient,” which as used herein, refers to a subject who may be diagnosed with a disease or condition disclosed herein.

[0612] The term “gene,” as used herein, refers to a segment of nucleic acid that encodes an individual protein or RNA (also referred to as a “coding sequence” or “coding region”), optionally together with associated regulatory region such as promoter, operator, terminator and the like, which may be located upstream or downstream of the coding sequence. A “genetic locus” referred to herein, is a particular location within a gene.

[0613] The term, “genotype” as disclosed herein, refers to the chemical composition of polynucleotide sequences within the genome of an individual. In some embodiments, the genotype comprises a single nucleotide polymorphism (SNP) or and indel (insertion or deletion, of a nucleobase within a polynucleotide sequence). In some embodiments, a genotype for a particular SNP, or indel is heterozygous. In some embodiments, a genotype for a particular SNP, or indel is homozygous.

[0614] A “polymorphism” as used herein refers to an aberration in (e.g., a mutation), or of (e.g., insertion/deletion), a nucleic acid sequence, as compared to the nucleic acid sequence in a reference population. In some embodiments, the polymorphism is common in the reference population. In some embodiments, the polymorphism is rare in the reference population. In some embodiments, the polymorphism is a single nucleotide polymorphism.

[0615] The term, “single nucleotide polymorphism” or SNP as disclosed herein, refers to a variation in a single nucleotide within a polynucleotide sequence. The term should not be interpreted as placing a restriction on a frequency of the SNP in a given population. The variation of an SNP may have multiple different forms. A single form of an SNP is referred to as an “allele.” An SNP can be mono-, bi-, tri, or tetra-allelic. A SNP may include a “risk allele,” a “protective allele,” or neither. By way of example, a reference polynucleotide sequence reading 5′ to 3′ is TTACG. A SNP at allele position 3 (of 5′-TTACG-3′) comprise a substitution of the reference allele, “A” to a non-reference allele, “C.” If the “C” allele of the SNP is associated with an increased probability of developing a phenotypic trait, the allele is considered a “risk” allele. However, the same SNP may also comprise a substitution of the “A” allele to a “T” allele at position 3. If the T allele of the SNP is associated with a decreased probability of developing a phenotypic trait, the allele is considered a “protective” allele. The SNP may be observed in at least 1% of a given population. In some embodiments, the SNP is represented by an “rs” number, which refers to the accession of reference cluster of one more submitted SNPs in the dbSNP bioinformatics database as of the filing date of this patent application, and which is included within a sequence that comprises the total number of nucleobases from 5′ to 3′. In some embodiments, a SNP may be further defined by the position of the SNP (nucleobase) within the dbSNP sequence, the position of which is always with reference to 5′ length of the sequence plus 1. In some embodiments, a SNP is defined as the genomic position in a reference genome and the allele change (e.g. chromosome 7 at position 234,123,567 from G allele to A allele in the reference human genome build 37). In some embodiments, the SNV is defined as the genomic position identified with [brackets] or an “N” in a sequence disclosed herein.

[0616] The term, “indel,” as disclosed herein, refers to an insertion, or a deletion, of a nucleobase within a polynucleotide sequence. An indel can be mono-, bi-, tri, or tetra-allelic. An indel may be “risk,” a “protective,” or neither, for a phenotypic trait. In some embodiments, the indel is represented by an “rs” number, which refers to the accession of reference cluster of one more submitted indels in the dbSNP bioinformatics database as of the filing date of this patent application, and which is included in a sequence that comprises the total number of nucleobases from 5′ to 3′. In some embodiments, an indel may be further defined by the position of the insertion/deletion within the dbSNP sequence, the position of which is always with reference to the 5′ length of the sequence plus 1. In some embodiments, an indel is defined as the genomic position in a reference genome and the allele change. In some embodiments, the indel is defined as the genomic position identified with [brackets] or an “N” in a sequence disclosed herein.

[0617] “Haplotype” as used herein, encompasses a group of one or more genotypes, which tend to be inherited together in a reference population. In some embodiments, a haplotype comprises particular polymorphism or another polymorphism in linkage disequilibrium (LD) therewith.

[0618] “Linkage disequilibrium,” or “LD,” as used herein refers to the non-random association of alleles or indels in different gene loci in a given population. LD may be defined by a D′ value corresponding to the difference between an observed and expected allele or indel frequencies in the population (D=Pab−PaPb), which is scaled by the theoretical maximum value of D. LD may be defined by an r² value corresponding to the difference between an observed and expected unit of risk frequencies in the population (D=Pab−PaPb), which is scaled by the individual frequencies of the different loci. In some embodiments, D′ comprises at least 0.20. In some embodiments, r² comprises at least 0.70.

[0619] The term “medically refractory,” or “refractory,” as used herein, refers to the failure of a standard treatment to induce remission of a disease. In some embodiments, the disease comprises an inflammatory disease disclosed herein. A non-limiting example of refractory inflammatory disease includes refractory Crohn's disease, and refractory ulcerative colitis (e.g., mrUC). Non-limiting examples of standard treatment include glucocorticosteriods, anti-TNF therapy, anti-a4-b7 therapy (vedolizumab), anti-IL12p40 therapy (ustekinumab), Thalidomide, and Cytoxin.

[0620] The terms “treat,” “treating,” and “treatment” as used herein refers to alleviating or abrogating a disorder, disease, or condition; or one or more of the symptoms associated with the disorder, disease, or condition; or alleviating or eradicating a cause of the disorder, disease, or condition itself. Desirable effects of treatment can include, but are not limited to, preventing occurrence or recurrence of disease, alleviation of symptoms, diminishing any direct or indirect pathological consequences of the disease, preventing metastasis, decreasing the rate of disease progression, amelioration or palliation of the disease state and remission or improved prognosis.

[0621] The term “therapeutically effective amount” refers to the amount of a compound or therapy that, when administered, is sufficient to prevent development of, or alleviate to some extent, one or more of the symptoms of a disorder, disease, or condition of the disease; or the amount of a compound that is sufficient to elicit biological or medical response of a cell, tissue, system, animal, or human that is being sought by a researcher, veterinarian, medical doctor, or clinician.

[0622] The term “pharmaceutically acceptable carrier,” “pharmaceutically acceptable excipient,” “physiologically acceptable carrier,” or “physiologically acceptable excipient” refers to a pharmaceutically-acceptable material, composition, or vehicle, such as a liquid or solid filler, diluent, excipient, solvent, or encapsulating material. A component can be “pharmaceutically acceptable” in the sense of being compatible with the other ingredients of a pharmaceutical formulation. It can also be suitable for use in contact with the tissue or organ of humans and animals without excessive toxicity, irritation, allergic response, immunogenicity, or other problems or complications, commensurate with a reasonable benefit/risk ratio. See, Remington: The Science and Practice of Pharmacy, 21st Edition; Lippincott Williams & Wilkins: Philadelphia, Pa., 2005; Handbook of Pharmaceutical Excipients, 5th Edition; Rowe et al., Eds., The Pharmaceutical Press and the American Pharmaceutical Association: 2005; and Handbook of Pharmaceutical Additives, 3rd Edition; Ash and Ash Eds., Gower Publishing Company: 2007; Pharmaceutical Preformulation and Formulation, Gibson Ed., CRC Press LLC: Boca Raton, Fla., 2004).

[0623] The term “pharmaceutical composition” refers to a mixture of a compound disclosed herein with other chemical components, such as diluents or carriers. The pharmaceutical composition can facilitate administration of the compound to an organism. Multiple techniques of administering a compound exist in the art including, but not limited to, oral, injection, aerosol, parenteral, and topical administration.

[0624] The term “inflammatory bowel disease” or “IBD” as used herein refers to gastrointestinal disorders of the gastrointestinal tract. Non-limiting examples of IBD include, Crohn's disease (CD), ulcerative colitis (UC), indeterminate colitis (IC), microscopic colitis, diversion colitis, Behcet's disease, and other inconclusive forms of IBD. In some instances, IBD comprises fibrosis, fibrostenosis, stricturing and/or penetrating disease, obstructive disease, or a disease that is refractory (e.g., mrUC, refractory CD), perianal CD, or other complicated forms of IBD.

[0625] Non-limiting examples of “sample” include any material from which nucleic acids and/or proteins can be obtained. As non-limiting examples, this includes whole blood, peripheral blood, plasma, serum, saliva, mucus, urine, semen, lymph, fecal extract, cheek swab, cells or other bodily fluid or tissue, including but not limited to tissue obtained through surgical biopsy or surgical resection. In various embodiments, the sample comprises tissue from the large and/or small intestine. In various embodiments, the large intestine sample comprises the cecum, colon (the ascending colon, the transverse colon, the descending colon, and the sigmoid colon), rectum and/or the anal canal. In some embodiments, the small intestine sample comprises the duodenum, jejunum, and/or the ileum. Alternatively, a sample can be obtained through primary patient derived cell lines, or archived patient samples in the form of preserved samples, or fresh frozen samples.

[0626] The term “biomarker” comprises a measurable substance in a subject whose presence, level, or activity, is indicative of a phenomenon (e.g., phenotypic expression or activity; disease, condition, subclinical phenotype of a disease or condition, infection; or environmental stimuli). In some embodiments, a biomarker comprises a gene, gene expression product (e.g., RNA or protein), or a cell-type (e.g., immune cell).

[0627] The term “serological marker,” as used herein refers to a type of biomarker representing an antigenic response in a subject that may be detected in the serum of the subject. In some embodiments, a serological comprises an antibody against various fungal antigens. Non-limiting examples of a serological marker comprise anti-Saccharomyces cerevisiae antibody (ASCA), an anti-neutrophil cytoplasmic antibody (ANCA), E. coli outer membrane porin protein C (OmpC), anti-Malassezia restricta antibody, anti-Malassezia pachydermatis antibody, anti-Malassezia furfur antibody, anti-Malassezia globasa antibody, anti-Cladosporium albicans antibody, anti-laminaribiose antibody (ALCA), anti-chitobioside antibody (ACCA), anti-laminarin antibody, anti-chitin antibody, pANCA antibody, anit-I2 antibody, and anti-Cbirl flagellin antibody.

[0628] The term “microbiome” and its variation used herein describe the populations and interactions of the bacteria, fungi, protists, and virus that align the gastrointestinal tract of a subject. A subject afflicted with IBD may possess presence, absence, excess, diminished, or a combination thereof of a microbiome s compared to a healthy subject.

[0629] The terms “non-response,” or “loss-of-response,” as used herein, refer to phenomena in which a subject or a patient does not respond to the induction of a standard treatment (e.g., anti-TNF therapy), or experiences a loss of response to the standard treatment after a successful induction of the therapy. The induction of the standard treatment may include 1, 2, 3, 4, or 5, doses of the therapy. A “successful induction” of the therapy may be an initial therapeutic response or benefit provided by the therapy. The loss of response may be characterized by a reappearance of symptoms consistent with a flare after a successful induction of the therapy.

[0630] The section headings used herein are for organizational purposes only and are not to be construed as limiting the subject matter described.

### Examples

[0631] The following examples are included for illustrative purposes only and are not intended to limit the scope of the invention.

### Example 1: Mega-Analysis Reveals Novel Genetic Associations With Extraintestinal Manifestations in Ibd

[0632] Genotype data from ImmunoChip array was available for 11,913 unrelated Caucasian IBD cases and 8,059 non-IBD controls from three cohorts: Cedars-Sinai IBD Research Institute (CS-IBD; n=12,886), NIDDK IBD Genetics Consortium (IBDGC; n=3551), and SHARE Consortium (n=3535). Standard SNP and sample QC measures were applied. Clinical charts were reviewed to verify EIMs. We performed mega case-control regression analyses of IBD patients comparing cases with at least one EIM (n=884) and cases without EIMs (n=11,029), adjusting for population substructure. For the CS-IBD cohort, we also investigated the HLA region with logistic regression of classical HLA alleles, imputed to 2-digit resolution with HIBAG, for MHC class I and II genes.

[0633] Results: We identified EIM associations at established IBD susceptibility loci, as well as putative novel loci. Known IBD locus HLA-B reached genome-wide (GW) significance for “EIM-4” (ankylosing spondylitis (AS), erythema nodosum (EN), pyoderma (PY), and uveitis/iritis (UVIR)) and AS (r56905036 P_{EIM4}=2.9E-08 OR_{EIM4}=1.7; P_{As}=1.1E-17 OR_{As}=2.8). GW association was also observed at MICA/HCP5 with EIM-4 and AS (r52844510 P_{EIM4}=1.9E-08 OR_{EIM4}=1.6; P_{AS}=1.8E-15 OR_{As}=2.5) and reached suggestive significance with UVIR (P_{UVIR}=4.0E-06 OR_{UVIR}=2.0). Novel associations include GW significance with METTL24 (rs7745186 P_{AS}=1.2E-08 OR_{As}=0.54) and CACNA 1C (rs 11614966 P_{AS}=1.7E-09 OR_{As}=0.40) with AS; as well as PLD5 with EN and suggestive significance with EIM-4 (r512757496 P_{EN}=4.5E-08 OR_{EN}=0.26; P_{EIM4}=5.7E-07 OR_{EIM4}=0.49). Analyses of imputed HLA alleles demonstrated association with AS at known alleles HLA-B*27 (P=9.0E-09 OR=2.7) and HLA-C*02 (P=2.8E-04 OR=2.0), and psoriasis at HLA-C*06 (P=6.3E-04 OR=1.5). Putative novel association was identified for psoriasis at HLA-DPB1* 10 (P=3.4E-05 OR=2.8) and HLA-DPB1*14 (P=5.3E-04 OR=2.0).

[0634] Conclusion: Genetics underlying EIMs in IBD is currently not as well understood as the genetics of IBD susceptibility. We have identified genetic variants and HLA alleles across several loci demonstrating association with EIM in IBD that highlight novel candidate loci for further investigation. Additional analyses, including IBD-disease phenotype associations, gene-based tests and pathway analyses, are in progress.

### Example 2: Analysis of Extraintestinal Manifestation Risk in Subjects with Inflammatory Bowel Disease

[0635] Data was analyzed from patient samples collected from four different cohorts. The four cohorts tested were CSMC (CEDARS), SHARE (Sinai Helmsley Alliance for Research Excellence with 7 recruiting sites), NIDDK (IBD Genetics Consortium with 6 GRCs since 2002), and RISK (pediatric CD inception cohort of newly diagnosed, treatment naïve patients across 28 sites). These cohorts are depicted in FIGS. 5-6 and Table 4.

TABLE 4
Study subjects

| | Pre-QC (N) | | | | |
|---|---|---|---|---|---|
| | IBD Cases | | | Healthy | Pre-QC |
| Cohort | EIM (+) | EIM (−) | Total | Controls | Total |
| CSMC | 1348 | 5303 | 6651 | 5127 | 11,778 |
| SHARE | 1798 | 2625 | 4423 | — | 4423 |
| NIDDK | 580 | 2059 | 2639 | 924 | 3563 |
| RISK | 87 | 558 | 645 | 1637 | 2282 |
| Total | 3813 | 10,545 | 14,358 | 7688 | 22,046 |
| | Post-QC (N) | | | | |
| | IBD Cases | | | Healthy | Post-QC |
| Cohort | EIM (+) | EIM (−) | Total | Controls | Total |
| CSMC | 1163 | 4195 | 5358 | 4,923 | 10,281 |
| SHARE | 1430 | 2066 | 3496 | — | 3496 |
| NIDDK | 578 | 2032 | 2610 | 920 | 3530 |
| RISK | 84 | 535 | 619 | 1629 | 2248 |
| Total | 3255 | 8828 | 12,083 | 7,472 | 19,555 |

[0636] The data was analyzed through multiple comparisons. Logistic regressions were performed between the 5 patient cohorts and the cohort batch, within case analyses (e.g. IBD cases with EIM versus cases without EIM). SNPs were excluded under quality control if the MAF was less than 1%, the deviation from HWE_{controls} had a p1<e-5), a SNP missingness of more than 10% or an AF difference of more than 10% (cohort, gnomAD). Minimal genomic inflation was observed (λGC˜1.02-1.07). FIG. 7 depicts a principle component analysis of the 2 cohorts.

[0637] After quality control, the percentage of patients with EIMs is listed in Table 5-6. SKIN-3 describes the percent of patients with erythema nodosum, pyoderma gangernosum, and psoriasis. EIMs in the eye include uveitis, iritis, episcleritis, scleritis, and other eye manifestations. EIM-6 describes the numbers of patients with ankylosing spondylitis and sacroiliitis, erythema nodosum, pyoderma gangernosum, psoriasis, EIMs in the eye, or primary sclerosing cholangitis. EIM-7 describes the numbers of patients with ankylosing spondylitis and sacroiliitis, erythema nodosum, pyoderma gangernosum, psoriasis, EIMs in the eye, primary sclerosing cholangitis, or peripheral arthritis. Peripheral arthritis includes Large & small joint arthritis, Extracolonic arthritis, Arthritis, CD/UC non-specific joint inflammation, or TBD-associated arthralgia complications.

TABLE 5
Phenotypes available after quality control

Post-QC

| | EIM (+) | EIM (−) |
|---|---|---|
| Ankylosing spondylitis & | 403 | 11,624 |
| Sacroiliitis | | |
| SKIN-3 * | 783 | 11,149 |
| Erythema nodosum | 320 | 11,712 |
| Pyoderma gangrenosum | 144 | 11,895 |
| Psoriasis | 367 | 8999 |
| Eye | 286 | 11,738 |
| Primary sclerosing cholangitis | 459 | 11,573 |
| Peripheral Arthritis | 2040 | 9874 |
| EIM-6 ^{#} | 1704 | 10,190 |
| EIM-7 ⁺ | 3255 | 8572 |

TABLE 6
EIMs broken down by cohort

| | CSMC IBD | | SHARE IBD | |
|---|---|---|---|---|
| | Subjects (Post-QC) | | Subjects (Post-QC) | |
| | EIM (+) | EIM (−) | EIM (+) | EIM (−) |
| Ankylosing spondylitis & | 286 | 5072 | 42 | 3453 |
| Sacroiliitis | | | | |
| SKIN-3 * | 384 | 4925 | 271 | 3179 |
| Erythema nodosum | 125 | 5233 | 107 | 3388 |
| Pyoderma gangrenosum | 60 | 5298 | 46 | 3450 |
| Psoriasis | 220 | 5083 | 137 | 3309 |
| Eye | 84 | 5274 | 95 | 3400 |
| Primary sclerosing cholangitis | 275 | 5083 | 117 | 3379 |
| Peripheral Arthritis | 441 | 4917 | 1169 | 2327 |
| EIM-6 ^{#} | 886 | 4430 | 486 | 2964 |
| EIM-7 ⁺ | 1163 | 4160 | 1430 | 2033 |
| | NIDDK IBD | | RISK IBD | |
| | Subjects (Post-QC) | | Subjects (Post-QC) | |
| | EIM (+) | EIM (−) | EIM (+) | EIM (−) |
| Ankylosing spondylitis & | 70 | 2517 | 5 | 582 |
| Sacroiliitis | | | | |
| SKIN-3 * | 93 | 2495 | 35 | 550 |
| Erythema nodosum | 63 | 2530 | 25 | 561 |
| Pyoderma gangrenosum | 36 | 2562 | 2 | 585 |
| Psoriasis | — | — | 10 | 607 |
| Eye | 103 | 2482 | 4 | 582 |
| Primary sclerosing cholangitis | 66 | 2525 | 1 | 586 |
| Peripheral Arthritis | 380 | 2100 | 50 | 530 |
| EIM-6 ^{#} | 291 | 2252 | 41 | 544 |
| EIM-7 ⁺ | 578 | 1883 | 84 | 496 |

[0638] The demographics of the patients across the study cohorts are listed in Table 7. Across the study cohort, about 15% of subjects with CD and about 13% of subjects with UC had any EIM. There was a predominancy of EIMs in CD, except for primary sclerosing cholangitis. Female subjects had heater levels of EIM, with the excepts of ankylosing spondylitis and primary sclerosing cholangitis. The mean age of diagnosis was 26 years of age. The majority of subjects had no family history of IBD and were not current smokers. The majority of subjects with CD had ileocolonic disease, inflammatory disease and no perianal complications. The majority of the subjects with UC had extensive disease.

TABLE 7
Cohort demographics

| | EIM-6 (+) | | EIM-6 (−) | |
|---|---|---|---|---|
| | (n = 1704) | | (n = 10,190) | |
| CD | 1129 | (15.3) | 6259 | (84.7) |
| UC | 528 | (12.7) | 3619 | (87.3) |
| IBDU | 47 | (13.1) | 312 | (86.9) |
| Sex (Female) | 919 | (53.9) | 4949 | (48.6) |
| Age at diagnosis (yrs) (mean (SD)) | 26.97 | (13.47) | 26.87 | (14.34) |
| Age at diagnosis (yrs) | | | | |
| A1 (<17) | 393 | (23.1) | 2414 | (23.7) |
| A2 (17-40) | 992 | (58.2) | 5169 | (50.7) |
| A3 (>40) | 266 | (15.6) | 1561 | (15.3) |
| Missing | 53 | (3.1) | 1046 | (10.3) |
| Family history of IBD | | | | |
| Yes | 453 | (26.6) | 2250 | (22.1) |
| No | 1207 | (70.8) | 6722 | (66.0) |
| Missing | 44 | (2.6) | 1218 | (12.0) |
| Current smoking | | | | |
| Yes | 282 | (16.5) | 1331 | (13.1) |
| No | 1394 | (81.8) | 7987 | (78.4) |
| Missing | 28 | (1.6) | 872 | (8.6) |
| Race (self-declared) | | | | |
| White | 1660 | (97.4) | 9853 | (96.7) |
| Black | 0 | (0.0) | 5 | (0.0) |
| Asian | 6 | (0.4) | 35 | (0.3) |
| Other | 36 | (2.1) | 195 | (1.9) |
| Missing | 2 | (0.1) | 102 | (1.0) |
| Jewish (self-reported) | | | | |
| Yes | 496 | (29.2) | 2546 | (25) |
| No | 1192 | (70.0) | 7511 | (73.7) |
| Missing | 16 | (0.9) | 133 | (1.3) |
| Hispanic (self-reported) | | | | |
| Yes | 36 | (2.1) | 232 | (2.3) |
| No | 1657 | (97.2) | 9849 | (96.7) |
| Missing | 11 | (0.6) | 109 | (1.1) |
| Disease location (CD) | | | | |
| Ileal (L1) | 165 | (14.6) | 1311 | (20.9) |
| Colorectal (L2) | 212 | (18.8) | 1022 | (16.3) |
| Ileocolonic (L3) | 709 | (62.8) | 3308 | (52.9) |
| Missing | 43 | (3.8) | 618 | (9.9) |
| Upper GI (L4) | 51 | (4.5) | 687 | (11.0) |
| Isolated small bowel disease (L1) | 165 | | 1311 | |
| Any colonic disease (L2 + L3) | 921 | | 4330 | |
| Inflammatory (B1) | 521 | (46.1) | 2907 | (46.4) |
| Stricturing (B2) | 262 | (23.2) | 1387 | (22.2) |
| Penetrating (B3) | 323 | (28.6) | 1442 | (23.0) |
| Missing | 23 | (2.0) | 523 | (8.4) |
| Perianal (CD) | | | | |
| Yes | 355 | (31.4) | 1477 | (23.6) |
| No | 737 | (65.3) | 4126 | (65.9) |
| Missing | 37 | (3.3) | 656 | (10.5) |
| Disease extent (UC/IBDU) | | | | |
| Proctitis (E1) | 19 | (3.3) | 273 | (6.9) |
| Left-sided [distal] (E2) | 92 | (16.0) | 998 | (25.4) |
| Extensive [pancolitis] (E3) | 403 | (70.1) | 1930 | (49.1) |
| Missing | 61 | (10.6) | 730 | (18.6) |
| IBD-related surgery | | | | |
| Yes | 827 | (48.5) | 3047 | (29.9) |
| No | 582 | (34.2) | 4097 | (40.2) |
| Missing | 295 | (17.3) | 3046 | (29.9) |

[0639] The clinical associations of the SNPs are shown in Table 8. This analysis is shown for EIM-6 as both a multivariate and univariate analysis. The association of EIM-6 with gender was maintained in both the univariate and multivariate analysis.

TABLE 8
Clinical associations

| | Univariate: EIM-6 | | | | | | |
|---|---|---|---|---|---|---|---|
| | | | Lower | Upper | | | |
| | | | CI | CI | Multivariate: EIM-6 | | |
| | Pval | OR | (95%) | (95%) | CD | UC | IBD |
| CD (Yes) | 1.66E−05 | 1.272 | 1.140 | 1.419 | | | |
| UC_IBDU (Yes) | 1.67E−05 | 0.786 | 0.705 | 0.877 | | | |
| Sex (Female) | 9.00E−05 | 1.229 | 1.109 | 1.363 | 6.74E−08 | | 1.13E−04 |
| Hispanic (Yes) | 0.33 | 0.838 | 0.587 | 1.195 | | | |
| Jewish (Yes) | 0.17 | 1.088 | 0.964 | 1.228 | | | |
| Age at Diagnosis | 0.43 | 0.999 | 0.995 | 1.002 | | | |
| Age at Diagnosis: < 17 | 0.44 | 0.950 | 0.834 | 1.083 | | | |
| years (Yes) | | | | | | | |
| Age at Diagnosis: < 10 | 0.54 | 0.926 | 0.726 | 1.182 | | | |
| years (Yes) | | | | | | | |
| Current Smoking (Yes) | 0.20 | 1.098 | 0.951 | 1.268 | | | |
| Family History (Yes) | 0.04 | 1.131 | 1.004 | 1.275 | | | |
| CD: Upper GI (Yes) | 0.84 | 1.021 | 0.834 | 1.249 | | | |
| CD: Any Colonic (L2L3 vs L1) | 9.78E−09 | 1.686 | 1.410 | 2.015 | 4.22E−09 | | |
| CD: Any Small Bowel | 0.38 | 0.929 | 0.787 | 1.097 | | | |
| (L1L3 vs L2) | | | | | | | |
| CD: Stricturing (B2 vs B1) | 0.66 | 0.963 | 0.818 | 1.135 | | | |
| CD: Penetrating (B3 vs B1) | 0.16 | 1.117 | 0.956 | 1.305 | | | |
| CD: Stricturing, | 0.57 | 1.039 | 0.911 | 1.186 | | | |
| Penetrating (B2B3 vs B1) | | | | | | | |
| CD: Penetrating vs | 0.11 | 1.158 | 0.967 | 1.387 | | | |
| Stricturing (B3 vs B2) | | | | | | | |
| CD: Perianal (Yes) | 6.60E−03 | 0.197 | 0.055 | 0.340 | | | |
| UC: Left-sided, | 4.08E−04 | 2.361 | 1.466 | 3.803 | | 0.01 | |
| Extensive (E2E3 vs E1) | | | | | | | |
| Surgery All (Yes) | 3.63E−19 | 1.715 | 1.524 | 1.931 | | | 8.45E−18 |
| Surgery CD (Yes) | 3.95E−04 | 1.307 | 1.127 | 1.516 | 1.32E−03 | | |
| Surgery UC (Yes) | 1.16E−20 | 2.714 | 2.200 | 3.348 | | 9.06E−16 | |

[0640] A multivariate analysis was run on the different categories. Table 9 shows the p values and odds ratios (parenthesis) of the different comparisons. An increased risk of EMs was associated with CD, although UC was associated with PSC. An increased risk of EMs was associated with female subjects, except male subjects has an increased risk of AS and PSC. An increased risk of EIMs was associated with being Jewish. An increased risk of EIMs was associated with an increased age of diagnosis for AS, GA and EIM7 and a degreased age of diagnosis for EN. An increased risk of EIMs was associated with smoking—for patients with ulcerative colitis, an increased risk of PS and SKIN3 was associated with smoking, for patients with CD, an increased risk of PA and EIM7 was associated with smoking. An increased with of EIM4s was associated with colonic disease location and extensive disease in UC (EIM6, EIM7, PSC). An increased risk of EIMs was associated with surgery, except for PS and eye-associated manifestations. For instance, a physician can make a treatment plan based on if a patient has an EIM or a risk of developing an EIM. In one instance, if a patient has a risk of developing psoriasis, then a physician would not treat with vedolizumab, but could treat with anti-TNF, ustekinumab, or tofacitinib.

TABLE 9
Clinical associations

| * ≤ 0.05 | | | | | | | | |
|---|---|---|---|---|---|---|---|---|
| ** ≤ 0.01 | | | | | | | | |
| *** ≤ 0.001 | Multivariate (OR) | | | | | | | |
| **** ≤ 0.0001 | EIM-6 | AS | EN | PG | PS | SKIN-3 | EYE | PSC |
| CD (Yes) | **** | **** | **** | *** | **** | **** | **** | **** |
| | (1.27) | (2.14) | (3.43) | (2.13) | (2.05) | (2.55) | (2.18) | (0.28) |
| UC_IBDU (yes) | **** | **** | **** | *** | **** | **** | **** | **** |
| | (0.79) | (0.47) | (0.29) | (0.47) | (0.9) | (0.39) | (0.46) | (3.61) |
| Sex (Female) | CD | CD * | CD | CD * | CD ** | CD | CD | CD * |
| | **** | (0.68) | **** | (1.56) | (1.53) | **** | **** | (0.54) |
| | (1.53) | | (4.34) | | | (2.53) | (1.76) | |
| | | | UC ** | UC * | | UC ** | UC * | |
| | | | (2.46) | (2.61) | | (1.81) | (1.66) | |
| Hispanic (Yes) | | | | | | | | |
| Jewish (Yes) | | | | | UC * | UC * | | |
| | | | | | (1.82) | (1.55) | | |
| Age at Diagnosis | | CD* | CD* | | | | | |
| | | (1.02) | (0.98) | | | | | |
| Age at Diagnosis: < 17 | | | | | | | | |
| years (Yes) | | | | | | | | |
| Age at Diagnosis: < 10 | | | | | | | | |
| years (Yes) | | | | | | | | |
| Current Smoking | | | | | UC * | UC ** | | |
| (Yes) | | | | | (1.78) | (1.96) | | |
| Family History (Yes) | | | | | | | | |
| CD: Upper GI (Yes) | | | | | | | | |
| CD: Any Colonic | **** | | * | ** | | ** | | ** |
| (L2L3 vs L1) | (1.92) | | (1.80) | (6.94) | | (2.60) | | (8.0) |
| CD: Any Small | | | | ** | | | | |
| Bowel (L1L3 vs L2) | | | | (0.46) | | | | |
| CD: Stricturing | | | | | | | | |
| (B2 vs B1) | | | | | | | | |
| CD: Penetrating | | | | | | | | |
| (B3 vs B1) | | | | | | | | |
| CD: Stricturing, | | | | | | | | **** |
| Penetrating (B2B3 vs B1) | | | | | | | | (0.27) |
| CD: Penetrating | | | | | | | | |
| vs Stricturing (B3 vs B2) | | | | | | | | |
| CD: Perianal (Yes) | | | **** | | | **** | | |
| UC: Left-sided, | * | | | | | | | ** |
| Extensive (E2E3 | (2.07) | | | | | | | (3.76) |
| vs E1) | | | | | | | | |
| Surgery | CD ** | | (IBD | CD | | (IBD | | CD |
| | (1.29) | | ****) | **** | | ****) | | **** |
| | | | | (3.30) | | | | (3.71) |
| | UC | UC | | | | | | UC |
| | **** | *** | | | | | | **** |
| | (2.51) | (2.61) | | | | | | (3.52) |

| | Multivariate (OR) | | |
|---|---|---|---|
| | PA | EIM-7 | >=2 any EIM-6 |
| CD (Yes) | **** (1.58) | **** (1.40) | **** (2.19) |
| UC_IBDU (Yes) | **** (0.63) | **** (0.72) | **** (0.46) |
| Sex (Female) | CD **** (1.69) | CD **** (1.53) | CD *** (1.86) |
| | UC **** (1.51) | UC * (1.20) | |
| Hispanic (Yes) | | | |
| Jewish (Yes) | | | |
| Age at Diagnosis | CD/UC **** | CD/UC *** | |
| | (1.02) | (1.01) | |
| Age at Diagnosis: < 17 years (Yes) | | | |
| Age at Diagnosis: < 10 years (Yes) | | | |
| Current Smoking (Yes) | CD **** (1.66) | CD ** (1.38) | |
| Family History (Yes) | CD/UC * | CD/UC */** | |
| | (1.2/1.31) | (1.21/1.33) | |
| CD: Upper GI (Yes) | | | |
| CD: Any Colonic (L2L3 vs L1) | **** (1.51) | **** (1.54) | *** (2.38) |
| CD: Any Small Bowel (L1L3 vs L2) | | | |
| CD: Stricturing (B2 vs B1) | | | |
| CD: Penetrating (B3 vs B1) | | | |
| CD: Stricturing, Penetrating | | | |
| (B2B3 vs B1) | | | |
| CD: Penetrating vs Stricturing | | | |
| (B3 vs B2) | | | |
| CD: Perianal (Yes) | | | |
| UC: Left-sided, Extensive (E2E3 vs E1) | | * (1.46) | |
| Surgery | CD **** (1.34) | CD **** | CD ** (1.61) |
| | | (1.47) | |
| | UC **** (1.59) | UC **** | UC *** (3.49) |
| | | (2.12) | |

Serological associations were also compared with the risk of EIMs. Specifically, Anti-Neutrophil Cytoplasmic Antibodies (ANCA), Anti-Saccharomyces Cerevisiae Antibodies (IgA, IgG ASCA), Anti-Outer membrane porin C (anti-OmpC), Anti-Pseudomonas fluorescens bacterial sequence 12 (anti-2), and Anti-Bacterial Flagellin (CBir1) were analyzed. In the Cedars cohort, 940 subjects had EIM4s and 2896 subjects did not. In the RISK cohort, 76 subjects has EIM4s and 474 did not. Serological associations are shown in Table 9A-9B.

TABLE 9A
Serological associations

| | | | | | |
|---|---|---|---|---|---|
| | | | | 95% CI | 95% CI |
| EIM_Pheno | Serology | Pval | OR | (lower) | (upper) |

CD

| | | | | | |
|---|---|---|---|---|---|
| AS | CBir1_pos | 2.73E−03 | 1.559 | 1.166 | 2.084 |
| EN | OmpC_level | 1.51E−02 | 1.008 | 1.002 | 1.015 |
| PY | ANCA_pos | 1.07E−02 | 2.245 | 1.206 | 4.179 |
| PY | ANCA_level | 4.05E−02 | 1.008 | 1.000 | 1.016 |
| PY | CBir1_pos | 2.79E−02 | 0.483 | 0.253 | 0.924 |
| PY | IgG_ASCA_pos | 4.62E−02 | 0.456 | 0.211 | 0.987 |
| PY | IgG_ASCAlevel | 3.47E−02 | 0.988 | 0.977 | 0.999 |
| PY | ASCA_pos | 2.58E−02 | 0.465 | 0.237 | 0.912 |
| PS | OmpC_pos | 2.19E−02 | 1.536 | 1.064 | 2.216 |
| PS | I2_pos | 4.15E−02 | 1.509 | 1.016 | 2.241 |
| SKIN3 | OmpC_level | 1.67E−02 | 1.006 | 1.001 | 1.011 |
| SKIN3 | OmpC_pos | 1.41E−02 | 1.427 | 1.074 | 1.895 |
| SKIN3 | I2_pos | 4.05E−02 | 1.369 | 1.014 | 1.850 |
| PSC | ANCA_pos | 3.37E−08 | 3.334 | 2.174 | 5.111 |
| PSC | ANCA_level | 7.27E−14 | 1.017 | 1.012 | 1.021 |
| PSC | CBir1_pos | 1.19E−03 | 0.466 | 0.293 | 0.739 |
| PSC | CBir1_level | 3.67E−03 | 0.988 | 0.979 | 0.996 |
| PSC | IgA_ASCA_pos | 4.50E−03 | 0.443 | 0.253 | 0.777 |
| PSC | IgA_ASCAlevel | 1.17E−03 | 0.981 | 0.970 | 0.993 |
| PSC | IgG_ASCA_pos | 1.29E−05 | 0.214 | 0.107 | 0.428 |
| PSC | IgG_ASCAlevel | 1.48E−05 | 0.978 | 0.968 | 0.988 |
| PSC | ASCA_pos | 8.96E−06 | 0.312 | 0.186 | 0.521 |
| PA | OmpC_pos | 1.39E−02 | 1.385 | 1.069 | 1.796 |
| PA | I2_pos | 1.89E−02 | 1.393 | 1.056 | 1.838 |
| PA | I2_level | 4.37E−02 | 1.003 | 1.000 | 1.006 |
| AS | CBir1_pos | 2.73E−03 | 1.559 | 1.166 | 2.084 |
| EN | OmpC_level | 1.51E−02 | 1.008 | 1.002 | 1.015 |
| PY | ANCA_pos | 1.07E−02 | 2.245 | 1.206 | 4.179 |
| PY | ANCA_level | 4.05E−02 | 1.008 | 1.000 | 1.016 |
| PY | CBir1_pos | 2.79E−02 | 0.483 | 0.253 | 0.924 |
| PY | IgG_ASCA_pos | 4.62E−02 | 0.456 | 0.211 | 0.987 |
| PY | IgG_ASCAlevel | 3.47E−02 | 0.988 | 0.977 | 0.999 |
| PY | ASCA_pos | 2.58E−02 | 0.465 | 0.237 | 0.912 |
| PS | OmpC_pos | 2.19E−02 | 1.536 | 1.064 | 2.216 |
| PS | I2_pos | 4.15E−02 | 1.509 | 1.016 | 2.241 |
| SKIN3 | OmpC_level | 1.67E−02 | 1.006 | 1.001 | 1.011 |
| SKIN3 | OmpC_pos | 1.41E−02 | 1.427 | 1.074 | 1.895 |
| SKIN3 | I2_pos | 4.05E−02 | 1.369 | 1.014 | 1.850 |
| PSC | ANCA_pos | 3.37E−08 | 3.334 | 2.174 | 5.111 |
| PSC | ANCA_level | 7.27E−14 | 1.017 | 1.012 | 1.021 |
| PSC | CBir1_pos | 1.19E−03 | 0.466 | 0.293 | 0.739 |
| PSC | CBir1_level | 3.67E−03 | 0.988 | 0.979 | 0.996 |
| PSC | IgA_ASCA_pos | 4.50E−03 | 0.443 | 0.253 | 0.777 |
| PSC | IgA_ASCAlevel | 1.17E−03 | 0.981 | 0.970 | 0.993 |
| PSC | IgG_ASCA_pos | 1.29E−05 | 0.214 | 0.107 | 0.428 |
| PSC | IgG_ASCAlevel | 1.48E−05 | 0.978 | 0.968 | 0.988 |
| PSC | ASCA_pos | 8.96E−06 | 0.312 | 0.186 | 0.521 |
| PA | OmpC_pos | 1.39E−02 | 1.385 | 1.069 | 1.796 |
| PA | I2_pos | 1.89E−02 | 1.393 | 1.056 | 1.838 |
| PA | I2_level | 4.37E−02 | 1.003 | 1.000 | 1.006 |
| EIM6 | ANCA_level | 6.30E−03 | 1.004 | 1.001 | 1.007 |
| EIM6 | I2_pos | 6.30E−03 | 1.359 | 1.091 | 1.694 |
| EIM6 | I2_level | 1.48E−02 | 1.003 | 1.001 | 1.005 |
| EIM6 | OmpC_pos | 3.45E−02 | 1.264 | 1.017 | 1.571 |
| EIM6 | OmpC_level | 1.74E−02 | 1.005 | 1.001 | 1.009 |
| EIM6 | IgG_ASCA_pos | 3.98E−03 | 0.733 | 0.594 | 0.906 |
| EIM6 | IgG_ASCA_level | 1.36E−03 | 0.996 | 0.993 | 0.998 |
| EIM6 | ASCA_pos | 1.14E−02 | 0.777 | 0.639 | 0.945 |
| EIM7 | ANCA_level | 4.33E−02 | 1.003 | 1.000 | 1.006 |
| EIM7 | I2_pos | 1.01E−04 | 1.476 | 1.213 | 1.796 |
| EIM7 | I2_level | 6.14E−04 | 1.004 | 1.002 | 1.006 |
| EIM7 | OmpC_pos | 4.81E−03 | 1.322 | 1.089 | 1.604 |
| EIM7 | OmpC_level | 1.01E−03 | 1.006 | 1.003 | 1.010 |
| EIM7 | IgG_ASCA_pos | 3.15E−03 | 0.759 | 0.631 | 0.911 |
| EIM7 | IgG_ASCA_level | 2.64E−03 | 0.996 | 0.994 | 0.999 |
| EIM7 | ASCA_pos | 2.07E−02 | 0.818 | 0.690 | 0.970 |
| >=2 any | ANCA_level | 4.26E−03 | 1.008 | 1.003 | 1.014 |
| EIM-6 | | | | | |
| >=2 any | IgG_ASCA_level | 3.45E−02 | 0.993 | 0.986 | 0.999 |
| EIM-6 | | | | | |

Cedars

| | | | | | |
|---|---|---|---|---|---|
| EIM6 | QSS | 0.08 | 1.034 | 0.996 | 1.074 |
| >=2 any | QSS | 0.50 | 0.973 | 0.900 | 1.053 |
| EIM-6 | | | | | |
| AS | QSS | 1.90E−02 | 1.067 | 1.011 | 1.126 |
| EN | QSS | 2.73E−02 | 1.104 | 1.011 | 1.205 |
| PY | QSS | 1.48E−02 | 0.856 | 0.755 | 0.970 |
| PS | QSS | 0.12 | 1.057 | 0.986 | 1.132 |
| SKIN3 | QSS | 0.23 | 1.032 | 0.980 | 1.087 |
| EYE | QSS | 0.62 | 0.977 | 0.892 | 1.070 |
| PSC | QSS | 8.00E−03 | 0.896 | 0.827 | 0.972 |
| PA | QSS | 3.75E−02 | 1.052 | 1.003 | 1.104 |
| EIM7 | QSS | 1.85E−03 | 1.055 | 1.020 | 1.092 |

TABLE 9B
UC serological associations

| | | | | | |
|---|---|---|---|---|---|
| | | | | 95% CI | 95% CI |
| EIM_Pheno | Serology | Pval | OR | (lower) | (upper) |

UC

| | | | | | |
|---|---|---|---|---|---|
| EN | OmpC_level | 4.43E−02 | 3.238 | 1.031 | 10.174 |
| PA | ASCA_pos | 2.53E−02 | 0.447 | 0.221 | 0.905 |
| PSC | CBir1_pos | 4.37E−02 | 1.559 | 1.013 | 2.401 |
| PSC | CBir1_level | 2.99E−03 | 1.008 | 1.003 | 1.014 |
| PSC | I2_level | 2.11E−02 | 1.007 | 1.001 | 1.013 |
| EN | OmpC_level | 4.43E−02 | 3.238 | 1.031 | 10.174 |
| PA | ASCA_pos | 2.53E−02 | 0.447 | 0.221 | 0.905 |
| PSC | CBir1_pos | 4.37E−02 | 1.559 | 1.013 | 2.401 |
| PSC | CBir1_level | 2.99E−03 | 1.008 | 1.003 | 1.014 |
| PSC | I2_level | 2.11E−02 | 1.007 | 1.001 | 1.013 |
| EN | OmpC_level | 4.43E−02 | 3.238 | 1.031 | 10.174 |
| PA | ASCA_pos | 2.53E−02 | 0.447 | 0.221 | 0.905 |
| PSC | CBir1_pos | 4.37E−02 | 1.559 | 1.013 | 2.401 |
| PSC | CBir1_level | 2.99E−03 | 1.008 | 1.003 | 1.014 |
| PSC | I2_level | 2.11E−02 | 1.007 | 1.001 | 1.013 |
| EIM6 | CBir1_level | 2.60E−03 | 1.008 | 1.003 | 1.013 |
| EIM7 | CBir1_level | 1.62E−02 | 1.006 | 1.001 | 1.011 |
| >=2 any | I2_pos | 2.18E−02 | 2.528 | 1.144 | 5.584 |
| EIM-6 | | | | | |

Cedars

| | | | | | |
|---|---|---|---|---|---|
| EIM6 | 7.35E−04 | QSS | 1.118 | 1.048 | 1.192 |
| >=2 any | 1.70E−02 | QSS | 1.206 | 1.034 | 1.406 |
| EIM-6 | | | | | |
| AS | 0.07 | QSS | 1.115 | 0.992 | 1.252 |
| EN | 0.14 | QSS | 1.204 | 0.943 | 1.538 |
| PY | 0.22 | QSS | 1.241 | 0.876 | 1.758 |
| PS | 0.88 | QSS | 1.013 | 0.856 | 1.199 |
| SKIN3 | 0.13 | QSS | 1.106 | 0.970 | 1.261 |
| EYE | 0.06 | QSS | 1.295 | 0.990 | 1.695 |
| PSC | 6.80E−03 | QSS | 1.111 | 1.029 | 1.198 |
| PA | 0.05 | QSS | 1.111 | 0.999 | 1.235 |
| EIM7 | 4.15E−04 | QSS | 1.117 | 1.051 | 1.188 |

[0641] A genome wide association analysis was performed to identify relevant loci. The following associations were identified are shown in Tables 10A-10E.

TABLE 10A
Genomic associations

| | | | | | GW | | | | | |
|---|---|---|---|---|---|---|---|---|---|---|
| | | | | | SNPs | | | | | |
| | | | hg19 | Candidate | (LD | Effect | | Beta | 95% | MAF |
| Phenotype | CHR | SNP | (Mb) | Gene(s) | r2 > 0.5) | Allele | Pval | (OR) | CI | (%) |
| SKIN-3 | 5 | rs80079682 | 173.29 | BOD1, CPEB4 | | A | 2.71E−08 | 0.418 | 0.271- | 15.7 |
| | | | | | | | | (1.52) | 0.565 | |
| AS-SI | 6 | rs6905036 | 31.27 | HLA-C, HLA-B | 3 | G | 1.36E−15 | 0.916 | 0.691- | 6.3 |
| | | | | | | | | (2.5) | 1.140 | |
| EYE | 6 | rs4349859 | 31.37 | HLA-B, MICA | | A | 1.99E−08 | 1.283 | 0.835- | 4.2 |
| | | | | | | | | (3.61) | 1.731 | |
| EIM-6 | 6 | rs4349859 | 31.37 | HLA-B, MICA | | A | 8.35E−09 | 0.788 | 0.520- | 4.2 |
| | | | | | | | | (2.2) | 1.056 | |
| AS-SI | 6 | rs2844510 | 31.41 | MICA, HCP5 | | A | 9.89E−13 | 0.745 | 0.541- | 10.1 |
| | | | | | | | | (2.11) | 0.950 | |
| PSC | 6 | rs9276456 | 32.72 | HLA- | 36 | G | 2.71E−10 | 1.014 | 0.699- | 18.1 |
| | | | | DQA2, HLA- | | | | (2.76) | 1.328 | |
| | | | | DQB2, | | | | | | |
| | | | | MIR3135B | | | | | | |

TABLE 10B
Genetic associations

| | | | | | Multiple | | | | | | |
|---|---|---|---|---|---|---|---|---|---|---|---|
| | | | | | assoc | | | | | | |
| | | | hg19 | Candidate | (LD | Effect | | | | | |
| Phenotype | CHR | SNP | (Mb) | Gene(s) | r2 > 0.5) | Allele | Pval | Beta | L95 | U95 | MAF |
| EIM6 | 6 | rs4463302 | 31.34 | HLA-B; MICA | * | G | 1.50E−07 | 0.595 | 0.373 | 0.817 | 6.42% |
| EIM6 | 6 | rs4418214 | 31.39 | MICA; HCP5 | | G | 1.03E−07 | 0.569 | 0.359 | 0.779 | 8.07% |
| EIM6 | 7 | rs2069835 | 22.77 | IL6 | | G | 6.14E−06 | 0.290 | 0.164 | 0.416 | 7.36% |
| EIM7 | 8 | rs61199332 | 11.43 | BLK; LINC28 | | A | 9.13E−06 | −0.442 | −0.638 | −0.247 | 2.56% |
| EIM7 | 9 | rs7857730 | 5.08 | JAK2 | * | C | 2.71E−06 | 0.195 | 0.113 | 0.276 | 46.33% |
| EIM7 | 11 | rs497871 | 114.35 | REXO2; | | G | 7.94E−06 | 0.203 | 0.114 | 0.292 | 11.16% |
| | | | | NXPE1 | | | | | | | |

TABLE 10C
Genetic associations

| Phenotype | HLA 2-digit | Pval | OR |
|---|---|---|---|
| AS | HLA_B_27 | 1.66E−08 | 2.74 |
| AS | HLA_C_2 | 2.99E−04 | 2.01 |
| PS | HLA_DPB1_10 | 4.03E−05 | 3.01 |
| PS | HLA_DRB1_14 | 1.98E−04 | 2.40 |

TABLE 10D
Additional Genetic associations

| | | | | | Multiple | | | | | | |
|---|---|---|---|---|---|---|---|---|---|---|---|
| | | | | | assoc | | | | | | |
| | | | hg19 | Candidate | (LD | Effect | | | | | |
| PHENO | CHR | SNP | (Mb) | Gene(s) | r2 > 0.5) | Allele | Pval | Beta | L95 | U95 | MAF |
| AS | 6 | rs2516514 | 31.45 | HCG26; MICB | | G | 2.15 | 0.457 | 0.284 | 0.630 | 21.39% |
| | | | | | | | E−07 | | | | |
| AS | 2 | rs17030062 | 65.46 | ACTR2 | | A | 8.76 | 0.892 | 0.499 | 1.285 | 1.39% |
| | | | | | | | E−06 | | | | |
| EN | 21 | rs9305694 | 41.54 | DSCAM | | A | 1.36 | 0.928 | 0.552 | 1.305 | 7.08% |
| | | | | | | | E−06 | | | | |
| PG | 4 | rs139009610 | 123.57 | IL21-AS1 | | C | 8.04 | 1.275 | 0.715 | 1.834 | 2.93% |
| | | | | | | | E−06 | | | | |
| PS | 6 | rs28732100 | 31.10 | PSORS1C1 | * | A | 4.24 | 1.043 | 0.639 | 1.447 | 4.87% |
| | | | | | | | E−07 | | | | |
| PS | 6 | rs12199223 | 31.24 | HLA-C; HLA-B | * | T | 8.69 | 0.561 | 0.338 | 0.785 | 9.87% |
| | | | | | | | E−07 | | | | |
| PS | 6 | rs1265181 | 31.16 | PSORS1C3; HCG27 | * | G | 2.51 | 0.538 | 0.314 | 0.763 | 20.20% |
| | | | | | | | E−06 | | | | |
| PS | 2 | rs13417109 | 207.52 | DYTN | * | T | 3.19 | 1.099 | 0.636 | 1.561 | 1.12% |
| | | | | | | | E−06 | | | | |
| PS | 2 | rs17026757 | 102.81 | IL1RL2 | * | C | 3.96 | 0.535 | 0.308 | 0.762 | 8.26% |
| | | | | | | | E−06 | | | | |
| PS | 14 | rs117670930 | 81.11 | CEP128 | | G | 4.44 | 0.847 | 0.485 | 1.209 | 2.30% |
| | | | | | | | E−06 | | | | |
| SKIN3 | 4 | rs115994059 | 102.89 | BANK1 | * | A | 3.05 | 0.574 | 0.333 | 0.815 | 3.12% |
| | | | | | | | E−06 | | | | |
| SKIN3 | 12 | rs7297515 | 126.90 | LINC939; | * | G | 4.04 | 1.033 | 0.594 | 1.473 | 1.91% |
| | | | | LOC1128554 | | | E−06 | | | | |
| SKIN3 | 5 | rs13166683 | 120.92 | PRR16; FTMT | | A | 5.20 | 0.625 | 0.356 | 0.894 | 6.56% |
| | | | | | | | E−06 | | | | |
| SKIN3 | 5 | rs62376929* | 173.29 | BOD1; CPEB4 | * | A | 8.62 | 0.293 | 0.164 | 0.422 | 15.80% |
| | | | | | | | E−06 | | | | |
| EYE | 6 | rs4418214 | 31.39 | MICA; HCP5 | | G | 5.56 | 1.007 | 0.612 | 1.401 | 8.07% |
| | | | | | | | E−07 | | | | |
| EYE | 6 | rs3819299 | 31.32 | HLA-B | * | C | 5.03 | 0.945 | 0.539 | 1.350 | 5.07% |
| | | | | | | | E−06 | | | | |
| EYE | 2 | rs2373969 | 41.21 | SLC8A1; Mir_584 | | G | 5.04 | 0.502 | 0.287 | 0.718 | 17.01% |
| | | | | | | | E−06 | | | | |
| EYE | 6 | rs4151651 | 31.92 | CFB | * | A | 8.77 | 0.700 | 0.391 | 1.009 | 4.42% |
| | | | | | | | E−06 | | | | |
| EYE | 6 | rs9366775 | 31.24 | HLA-C | | A | 9.29 | 0.941 | 0.525 | 1.356 | 3.47% |
| | | | | | | | E−06 | | | | |
| PSC | 6 | rs2858884 ** | 32.70 | HLA- | * | C | 5.72 | 0.858 | 0.548 | 1.168 | 22.49% |
| | | | | DQB1; HLA- | | | E−08 | | | | |
| | | | | DQA2 | | | | | | | |
| PSC | 6 | rs2858319 | 32.66 | HLA- | * | A | 2.11 | 0.807 | 0.502 | 1.111 | 35.02% |
| | | | | DQB1; HLA- | | | E−07 | | | | |
| | | | | DQA2 | | | | | | | |
| PSC | 6 | rs6917611 | 32.77 | HLA- | | G | 4.25 | 0.753 | 0.461 | 1.044 | 44.41% |
| | | | | DQB2; HLA-DOB | | | E−07 | | | | |
| PSC | 6 | rs6930571 | 32.38 | BTNL2; HLA- | * | A | 4.64 | 0.726 | 0.444 | 1.009 | 13.73% |
| | | | | DRA | | | E−07 | | | | |
| PSC | 6 | rs389419 | 29.52 | LINC115; UBD | * | A | 2.38 | −1.473 | −2.085 | −0.861 | 7.41% |
| | | | | | | | E−06 | | | | |
| PSC | 17 | rs76558762 | 26.05 | LGALS9; NOS2 | | C | 4.37 | 1.168 | 0.670 | 1.667 | 1.78% |
| | | | | | | | E−06 | | | | |
| PSC | 12 | rs7956721 | 40.79 | MUC19 | * | A | 5.63 | 0.321 | 0.182 | 0.459 | 30.06% |
| | | | | | | | E−06 | | | | |
| PSC | 16 | rs887864 | 11.16 | CLEC16A | * | G | 5.75 | −0.338 | −0.483 | −0.192 | 36.79% |
| | | | | | | | E−06 | | | | |
| PSC | 6 | rs9276424 | 32.71 | HLA-DQA2 | * | G | 8.25 | 0.662 | 0.371 | 0.954 | 38.17% |
| | | | | | | | E−06 | | | | |
| PA | 5 | rs10056322 | 35.99 | UGT3A1 | | G | 1.05 | −1.287 | −1.804 | −0.771 | 1.88% |
| | | | | | | | E−06 | | | | |
| PA | 7 | rs6461986 | 27.16 | HOXA3 | | T | 2.16 | 0.637 | 0.374 | 0.901 | 1.77% |
| | | | | | | | E−06 | | | | |
| PA | 2 | rs13421864 | 231.21 | SP14L | | C | 9.34 | 0.471 | 0.263 | 0.680 | 3.17% |
| | | | | | | | E−06 | | | | |

TABLE 10E
ChX Genetic associations

| | | | | | | | | | | | | Sex- | |
|---|---|---|---|---|---|---|---|---|---|---|---|---|---|
| | | | | | | | | | | | | Stratified | |
| | | | | | | | | XCI_{complete} | | XCI_{escape} | | F_{comb} | S_{comb} |
| SNP | Gene | BP | MAF | F-MAF | M-MAF | Phenotype | A1 | Pval | Beta | Pval | Beta | Pval | Pval |
| 1 kg_X_ | GAB3 | 153.94 | 0.022 | 0.033 | 0.002 | PA | A | 1.69 | −0.744 | 1.0 | −0.765 | 2.9 | 6.0 |
| 153591526 | | | | | | | | E−07 | | 3E−07 | | 0E−07 | 3E−05 |
| rs7877788 | ARSF | 2.98 | 0.036 | 0.035 | 0.038 | PA | G | 7.51 | −0.382 | 3.5 | −0.523 | 1.2 | 3.8 |
| | | | | | | | | E−05 | | 2E−05 | | 9E−04 | 8E−05 |

### Example 3: Modeling Primary Sclerosing Cholangitis in Crohn's Disease

[0642] A model is generated to predict PSC in CD. The model variables include sex, any colonic disease, surgery, ANCA level ASCA positivity and 7 SNPS with a p value of less than 1×10⁻⁵. The results of the model are shown in FIGS. 8A-8C and Tables 11A-11C. Model A is depicted in FIG. 8A Model B, as depicted in FIG. 8B shows the results using only the updated Cedars dataset. Model C, depicted in FIG. 8C is a null model using only the updated Cedars dataset. The models tested a comparison of clinical data only (101), serology only (102), genetics only (103), a combination of clinical and serology data (104), a combination of clinical, serology, and genetic markers (105), a combination of clinical and genetic markers (106) and a combination of serology and genetic markers (107).

TABLE 11A
Efficacy of the tested model in FIG. 8A

| | AUC | 95% CI |
|---|---|---|
| Clinical Only | 0.7108 | 0.6622-0.7593 |
| Serology Only | 0.7636 | 0.7157-0.8114 |
| Genetics Only | 0.7319 | 0.6721-0.7918 |
| Clinical + Serology | 0.7764 | 0.7316-0.8213 |
| Clinical + Genetics | 0.7796 | 0.7237-0.8355 |
| Serology + Genetics | 0.9353 | 0.8807-0.9899 |
| Clinical + Serology + Genetics | 0.9554 | 0.9231-0.9878 |

TABLE 11B
Efficacy of the tested model in FIG. 8B

| | AUC | 95% CI |
|---|---|---|
| Clinical Only | 0.704 | 0.6552-0.7528 |
| Serology Only | 0.7168 | 0.6598-0.7739 |
| Genetics Only | 0.7726 | 0.6188-0.9264 |
| Clinical + Serology | 0.8018 | 0.751-0.8525 |
| Clinical + Genetics | 0.8795 | 0.7804-0.9786 |
| Serology + Genetics | 0.8324 | 0.7067-0.9581 |
| Clinical + Serology + Genetics | 0.909 | 0.8452-0.9728 |

TABLE 11C
Efficacy of the “null model” in FIG. 8C

| | AUC | 95% CI |
|---|---|---|
| Clinical Only B (multivar) | 0.5466 | 0.5088-0.5845 |
| Serology Only B (multivar) | 0.6611 | 0.6089-0.7134 |
| Genetics Only 2 (reading/writing) | 0.5382 | 0.4911-0.5852 |
| Clinical + Serology B (multivar) | 0.683 | 0.6322-0.7337 |
| Clinical B + Genetics 2 | 0.574 | 0.5289-0.6192 |
| Serology B + Genetics 2 | 0.6798 | 0.627-0.7327 |
| Clinical B + Serology B + Genetics 2 | 0.7018 | 0.6493-0.7544 |

### Example 4: Phase I Clinical Trial

[0643] A phase 1 clinical trial is performed to evaluate the safety, tolerability, pharmacokinetics and pharmacodynamics of a therapeutic agent on subjects having Crohn's disease (CD).

[0644] Single ascending dose (SAD) arms: Subjects in each group (subjects are grouped based on the presence of a genotype comprising at least one, two, or three polymorphism(s) selected from Table 1 and subjects without the presence of the genotype) receive either a single dose of the antibody or a placebo. Exemplary doses are 1, 3, 10, 30, 100, 300, 600 and 800 mg of antibody. Safety monitoring and PK assessments are performed for a predetermined time. Based on evaluation of the PK data, and if the antibody is deemed to be well tolerated, dose escalation occurs, either within the same groups or a further group of healthy subjects. Dose escalation continues until the maximum dose has been attained unless predefined maximum exposure is reached or intolerable side effects become apparent.

[0645] Multiple ascending dose (MAD) arms: Subjects in each group (subjects are grouped based on the same criteria as above) receive multiple doses of the antibody or a placebo. The dose levels and dosing intervals are selected as those that are predicted to be safe from the SAD data. Dose levels and dosing frequency are chosen to achieve therapeutic drug levels within the systemic circulation that are maintained at steady state for several days to allow appropriate safety parameters to be monitored. Samples are collected and analyzed to determination PK profiles.

[0646] Inclusion Criteria: Healthy subjects of non-childbearing potential between the ages of 18 and 55 years. Healthy is defined as no clinically relevant abnormalities identified by a detailed medical history, full physical examination, including blood pressure and pulse rate measurement, 12 lead ECG and clinical laboratory tests. Female subjects of non-childbearing potential must meet at least one of the following criteria: (1) achieved postmenopausal status, defined as: cessation of regular menses for at least 12 consecutive months with no alternative pathological or physiological cause; and have a serum follicle stimulating hormone (FSH) level within the laboratory's reference range for postmenopausal females; (2) have undergone a documented hysterectomy and/or bilateral oophorectomy; (3) have medically confirmed ovarian failure. All other female subjects (including females with tubal ligations and females that do NOT have a documented hysterectomy, bilateral oophorectomy and/or ovarian failure) will be considered to be of childbearing potential. Body Mass Index (BMI) of 17.5 to 30.5 kg/m2; and a total body weight >50 kg (110 lbs). Evidence of a personally signed and dated informed consent document indicating that the subject (or a legal representative) has been informed of all pertinent aspects of the study.

[0647] Two groups of CD patients are selected: patients having the genotype described herein, and patients without the genotype. For example, the genotype may comprise rs2516514, rs17030062, rs9305694, rs139009610, rs28732100, rs12199223, rs1265181, rs13417109, rs17026757, rs117670930, rs115994059, rs7297515, rs13166683, rs62376929, rs4418214, rs3819299, rs2373969, rs4151651, rs9366775, rs2858884, rs2858319, rs6917611, rs6930571, rs389419, rs76558762, rs7956721, rs887864, rs9276424, rs10056322, rs6461986, and rs13421864.

[0648] Exclusion Criteria: Evidence or history of clinically significant hematological, renal, endocrine, pulmonary, gastrointestinal, cardiovascular, hepatic, psychiatric, neurologic, or allergic disease (including drug allergies, but excluding untreated, asymptomatic, seasonal allergies at time of dosing). Subjects with a history of or current positive results for any of the following serological tests: Hepatitis B surface antigen (HBsAg), Hepatitis B core antibody (HBcAb), anti-Hepatitis C antibody (HCV Ab) or human immunodeficiency virus (HIV). Subjects with a history of allergic or anaphylactic reaction to a therapeutic drug. Treatment with an investigational drug within 30 days (or as determined by the local requirement, whichever is longer) or 5 half-lives or 180 days for biologics preceding the first dose of study medication. Pregnant females; breastfeeding females; and females of childbearing potential.

[0649] Primary Outcome Measures: Incidence of dose limiting or intolerability treatment related adverse events (AEs) [Time Frame: 12 weeks]. Incidence, severity and causal relationship of treatment emergent AEs (TEAEs) and withdrawals due to treatment emergent adverse events [Time Frame: 12 weeks]. Incidence and magnitude of abnormal laboratory findings [Time Frame: 12 weeks]. Abnormal and clinically relevant changes in vital signs, blood pressure (BP) and electrocardiogram (ECG) parameters [Time Frame: 12 weeks]. Extra-intestinal manifestations are also measured.

[0650] Secondary Outcome Measures: Single Ascending Dose: Maximum Observed Plasma Concentration (Cmax) [Time Frame: 12 weeks]. Single Ascending Dose: Time to Reach Maximum Observed Plasma Concentration (Tmax) [Time Frame: 12 weeks]. Single Ascending Dose: Area under the plasma concentration-time profile from time zero to 14 days (AUC14 days) [Time Frame: 12 weeks]. Single Ascending Dose: Area under the plasma concentration-time profile from time zero extrapolated to infinite time (AUCinf) [Time Frame: 12 weeks]. Single Ascending Dose: Area under the plasma concentration-time profile from time zero to the time of last quantifiable concentration (AUClast) [Time Frame: 12 weeks]. Single Ascending Dose: Dose normalized maximum plasma concentration (Cmax[dn]) [Time Frame: 12 weeks]. Single Ascending Dose: Dose normalized area under the plasma concentration-time profile from time zero extrapolated to infinite time (AUCinf[dn]) [Time Frame: 12 weeks]. Single Ascending Dose: Dose normalized area under the plasma concentration-time profile from time zero to the time of last quantifiable concentration (AUClast[dn]) [Time Frame: 12 weeks]. Single Ascending Dose: Plasma Decay Half-Life (t½) [Time Frame: 12 weeks]. Plasma decay half-life is the time measured for the plasma concentration to decrease by one half. Single Ascending Dose: Mean residence time (MRT) [Time Frame: 12 weeks]. Single Ascending Dose: Volume of Distribution at Steady State (Vss) [Time Frame: 6 weeks]. Volume of distribution is defined as the theoretical volume in which the total amount of drug would need to be uniformly distributed to produce the desired blood concentration of a drug. Steady state volume of distribution (Vss) is the apparent volume of distribution at steady-state. Single Ascending Dose: Systemic Clearance (CL) [Time Frame: 6]. CL is a quantitative measure of the rate at which a drug substance is removed from the body.

[0651] Multiple Ascending Dose First Dose: Maximum Observed Plasma Concentration (Cmax) [Time Frame: 12 weeks]. Multiple Ascending Dose First Dose: Time to Reach Maximum Observed Plasma Concentration (Tmax) [Time Frame: 12 weeks]. Multiple Ascending Dose First Dose: Area under the plasma concentration-time profile from time zero to time τ, the dosing interval where r=2 weeks (AUCτ) [Time Frame: 12 weeks]. Multiple Ascending Dose First Dose: Dose normalized maximum plasma concentration (Cmax[dn]) [Time Frame: 12 weeks]. Multiple Ascending Dose First Dose: Dose normalized Area under the plasma concentration-time profile from time zero to time τ, the dosing interval where i=2 weeks (AUCτ [dn]) [Time Frame: 12 weeks]. Plasma Decay Half-Life (t½) [Time Frame: 12 weeks]. Plasma decay half-life is the time measured for the plasma concentration to decrease by one half. Multiple Ascending Dose First Dose: Mean residence time (MRT) [Time Frame: 12 weeks]. Apparent Volume of Distribution (Vz/F) [Time Frame: 12 weeks]. Volume of distribution is defined as the theoretical volume in which the total amount of drug would need to be uniformly distributed to produce the desired plasma concentration of a drug. Apparent volume of distribution after oral dose (Vz/F) is influenced by the fraction absorbed. Multiple Ascending Dose First Dose: Volume of Distribution at Steady State (Vss) [Time Frame: 12 weeks]. Volume of distribution is defined as the theoretical volume in which the total amount of drug would need to be uniformly distributed to produce the desired blood concentration of a drug. Steady state volume of distribution (Vss) is the apparent volume of distribution at steady-state. Multiple Ascending Dose First Dose: Apparent Oral Clearance (CL/F) [Time Frame: 12 weeks]. Clearance of a drug is a measure of the rate at which a drug is metabolized or eliminated by normal biological processes. Clearance obtained after oral dose (apparent oral clearance) is influenced by the fraction of the dose absorbed. Clearance is estimated from population pharmacokinetic (PK) modeling. Drug clearance is a quantitative measure of the rate at which a drug substance is removed from the blood. Multiple Ascending Dose First Dose: Systemic Clearance (CL) [Time Frame: 12 weeks]. CL is a quantitative measure of the rate at which a drug substance is removed from the body.

[0652] Multiple Ascending Dose Multiple Dose: Maximum Observed Plasma Concentration (Cmax) [Time Frame: 12 weeks]. Multiple Ascending Dose Multiple Dose: Time to Reach Maximum Observed Plasma Concentration (Tmax) [Time Frame: 12 weeks]. Multiple Ascending Dose Multiple Dose: Area under the plasma concentration-time profile from time zero to time τ, the dosing interval where r=2 weeks (AUCτ) [Time Frame: 12 weeks]. Multiple Ascending Dose Multiple Dose: Dose normalized maximum plasma concentration (Cmax[dn]) [Time Frame: 12 weeks]. Multiple Ascending Dose Multiple Dose: Dose normalized Area under the plasma concentration-time profile from time zero to time τ, the dosing interval where r=2 weeks (AUCτ [dn]) [Time Frame: 12 weeks]. Multiple Ascending Dose Multiple Dose: Plasma Decay Half-Life (t½) [Time Frame: 12 weeks]. Plasma decay half-life is the time measured for the plasma concentration to decrease by one half. Multiple Ascending Dose Multiple Dose: Apparent Volume of Distribution (Vz/F) [Time Frame: 12 weeks]. Volume of distribution is defined as the theoretical volume in which the total amount of drug would need to be uniformly distributed to produce the desired plasma concentration of a drug. Apparent volume of distribution after oral dose (Vz/F) is influenced by the fraction absorbed. Multiple Ascending Dose Multiple Dose: Volume of Distribution at Steady State (Vss) [Time Frame: 12 weeks]. Volume of distribution is defined as the theoretical volume in which the total amount of drug would need to be uniformly distributed to produce the desired blood concentration of a drug. Steady state volume of distribution (Vss) is the apparent volume of distribution at steady-state.

[0653] Multiple Ascending Dose Multiple Dose: Apparent Oral Clearance (CL/F) [Time Frame: 12 weeks]. Clearance of a drug is a measure of the rate at which a drug is metabolized or eliminated by normal biological processes. Clearance obtained after oral dose (apparent oral clearance) is influenced by the fraction of the dose absorbed. Clearance was estimated from population pharmacokinetic (PK) modeling. Drug clearance is a quantitative measure of the rate at which a drug substance is removed from the blood. Multiple Ascending Dose Multiple Dose: Systemic Clearance (CL) [Time Frame: 12 weeks]. CL is a quantitative measure of the rate at which a drug substance is removed from the body. Multiple Ascending Dose Multiple Dose: Minimum Observed Plasma Trough Concentration (Cmin) [Time Frame: 12 weeks]. Multiple Ascending Dose Multiple Dose: Average concentration at steady state (Cav) [Time Frame: 12 weeks]. Multiple Ascending Dose Multiple Dose: Observed accumulation ratio (Rac) [Time Frame: 12 weeks]. Multiple Ascending Dose Multiple Dose: Peak to trough fluctuation (PTF) [Time Frame: 12 weeks]. Multiple Ascending Dose Additional Parameter: estimate of bioavailability (F) for subcutaneous administration at the corresponding intravenous dose [Time Frame: 12 weeks]. Immunogenicity for both Single Ascending Dose and Multiple Ascending Dose: Development of anti-drug antibodies (ADA) [Time Frame: 12 weeks].

### Example 5: Phase 1B Clinical Trial

[0654] A phase 1b open label clinical trial is performed to evaluate efficacy of a therapeutic agent antibody on subjects having CD.

[0655] Arms: 10 patients positive for genotypes comprising at least one polymorphism(s) provided in Table 1 are administered the antibody. 10 patients negative for the genotype are administered the therapeutic agent. Patients are monitored in real-time. Central ready of endoscopy and biopsy is employed, with readers blinded to point of time of treatment and endpoints. Patients are also monitored for extra-intestinal manifestations.

[0656] For example, the genotypes may comprise rs2516514, rs17030062, rs9305694, rs139009610, rs28732100, rs12199223, rs1265181, rs13417109, rs17026757, rs117670930, rs115994059, rs7297515, rs13166683, rs62376929, rs4418214, rs3819299, rs2373969, rs4151651, rs9366775, rs2858884, rs2858319, rs6917611, rs6930571, rs389419, rs76558762, rs7956721, rs887864, rs9276424, rs10056322, rs6461986, and rs13421864.

[0657] Inclusion Criteria: Two groups of patients are selected: subject with the genotype described herein, and patients without the genotype.

[0658] Primary Outcome Measures: Simple Endoscopic Score for Crohn's Disease (SESCD), Crohn's Disease Activity Index (CDAI), and Patient Reported Outcome (PRO). If risk either positive group shows 50% reduction from baseline, a Phase 2a clinical trial is performed.

[0659] Inclusion Criteria: PRO entry criteria: Abdominal pain score of 2 or more and/or stool frequency score of 4 or more. Primary outcome would be pain core of 0 or 1 and stool frequency score of 3 or less with no worsening from baseline. Endoscopy entry criteria: SESCD ileum only entry at score of 4 and 6 if colon is involved. Primary endoscopic outcome is 40-50% delta of mean SESCD.

### Example 6: Phase 2A Clinical Trial

[0660] A phase 2a clinical trial is performed to evaluate the efficacy of a therapeutic in patients with CD. Optionally, the patients are positive for a genotype comprising at least one, two, or at least three, polymorphism(s) provided in Table 1. Patients are also monitored for development of an extra-intestinal manifestation.

[0661] Arms: 40 patients per arm (antibody and placebo arms) are treated with antibody or placebo for 12 weeks. An interim analysis is performed after 20 patients from each group are treated at the highest dose to look for a 40-50% delta between placebo and treated group in primary outcome (50% reduction from baseline in SESCD, CDAI, and PRO).

[0662] Primary Outcome Measures: Simple Endoscopic Score for Crohn's Disease (SESCD), Crohn's Disease Activity Index (CDAI), and Patient Reported Outcome (PRO).

[0663] Inclusion Criteria: PRO entry criteria: Abdominal pain score of 2 or more and/or stool frequency score of 4 or more. Primary outcome would be pain core of 0 or 1 and stool frequency score of 3 or less with no worsening from baseline. Endoscopy entry criteria: SESCD ileum only entry at score of 4 and 6 if colon is involved. Primary endoscopic outcome is 40-50% delta of mean SESCD.

### Example 7: Treating Crohn's Disease (CD) in a Subject

[0664] CD is treated in a subject, by first, determining the genotypes of the subject. Optionally, the subject is, or is susceptible to, non-response to the induction of certain therapies such as anti-TNF, steroids, or immunomodulators, or loses response to such therapies after a period of time. A sample of whole blood is obtained from the subject. An assay is performed on the sample obtained from the subject to detect a presence of a genotype comprising at least one polymorphism(s) provided in Table 1. Patients are also monitored for the development of an extra-intestinal manifestation.

[0665] At least one, two, or three polymorphisms comprising rs2516514, rs17030062, rs9305694, rs139009610, rs28732100, rs12199223, rs1265181, rs13417109, rs17026757, rs117670930, rs115994059, rs7297515, rs13166683, rs62376929, rs4418214, rs3819299, rs2373969, rs4151651, rs9366775, rs2858884, rs2858319, rs6917611, rs6930571, rs389419, rs76558762, rs7956721, rs887864, rs9276424, rs10056322, rs6461986, and rs13421864, or any of the above combinations in which a polymorphism is substituted with a proxy polymorphism, are detected in the sample by Illumina ImmunoArray or polymerase chain reaction (PCR) under standard hybridization conditions. Proxy polymorphisms are identified using linkage disequilibrium with a D′1 value of at least 0.8, or an r² value of at least 0.85. In some cases, the proxy polymorphism is additionally selected based on an independent association between the polymorphism and a relevant clinical phenotype of CD (e.g., stricturing and penetrating disease) In this example, one or more primer pairs described herein and/or nucleic acid probes comprising nucleic acid sequences capable of hybridizing the nucleic acid sequences, or their reverse compliments, provided in SEQ ID NOS: 2001-2031, are used.

[0666] A EIM profile is generated that correlates the presence or absence of the genotypes with a positive, negative or indeterminate result for a therapeutic response to treatment with a therapeutic agent with a positive predictive value and specificity of at least or about 70%.

[0667] The EIM profile of the subject is positive. Based on the EIM profile of the CD patient, a doctor determines that the subject is suitable for treatment with the therapeutic agent. A therapeutically effective amount of a therapeutic agent is administered to the subject with the positive EIM profile.

[0668] While preferred embodiments of the present invention have been shown and described herein, it will be obvious to those skilled in the art that such embodiments are provided by way of example only. Numerous variations, changes, and substitutions will now occur to those skilled in the art without departing from the invention. It should be understood that various alternatives to the embodiments of the invention described herein may be employed in practicing the invention. It is intended that the following claims define the scope of the invention and that methods and structures within the scope of these claims and their equivalents be covered thereby.

What is claimed:

1. A method for treating a subject having an inflammatory bowel disease, the method comprising administering to the subject a therapeutic agent, provided the subject has been determined to have a genotype comprising one or more single nucleotide polymorphisms selected from the group comprising rs6905036, rs2844510, rs2516514, and rs17030062.

2. The method of claim 1, wherein the subject has been determined to be at risk for developing ankylosing spondylitis and/or sacroiliitis.

3. A method for evaluating whether a subject having an inflammatory bowel disease will develop an extra-intestinal manifestation (EIM), the method comprising determining whether the subject has a genotype comprising one or more single nucleotide polymorphisms selected from the group comprising rs6905036, rs2844510, rs2516514, and rs17030062.

4. The method of claim 3, wherein the EIM comprises ankylosing spondylitis and/or sacroiliitis.

5. The method of claim 3 or claim 4, further comprising administering to the subject a therapeutic agent.

6. The method of any one of claim 1, 2, or 5, wherein the therapeutic agent comprises an anti-TL1A antibody, anti-CD30L antibody, glucocorticosteroid, anti-TNF therapy, anti-a4-b7 therapy, anti-IL12p40 therapy, JAK inhibitor, thalidomide, or cyclophosphamide, or a combination thereof.

7. The method of any one of claim 1, 2, 5, or 6, wherein the therapeutic agent comprises etanercept, adalimumab, infliximab, cyclobenzaprine, a steroid, secukinumab, methotrexate, leflunomide, hydroxychloroquine, or sulfasalazine, or a combination thereof.

8. A method for treating a subject having an inflammatory bowel disease, the method comprising administering to the subject a therapeutic agent, provided the subject has been determined to have a genotype comprising one or more single nucleotide polymorphisms selected from the group comprising rs9276456, rs2858884, rs2858319, rs6917611, rs6930571, rs389419, rs76558762, rs7956721, rs887864, and rs9276424.

9. The method of claim 8, wherein the subject has been determined to be at risk for developing primary sclerosing cholangitis.

10. A method for evaluating whether a subject having an inflammatory bowel disease will develop an extra-intestinal manifestation (EIM), the method comprising determining whether the subject has a genotype comprising one or more single nucleotide polymorphisms selected from the group comprising rs9276456, rs2858884, rs2858319, rs6917611, rs6930571, rs389419, rs76558762, rs7956721, rs887864, and rs9276424.

11. The method of claim 10, wherein the EIM comprises primary sclerosing cholangitis.

12. The method of claim 10 or claim 11, further comprising administering to the subject a therapeutic agent.

13. The method of any one of claim 8, 9, or 12, wherein the therapeutic agent comprises an anti-TL1A antibody, anti-CD30L antibody, glucocorticosteroid, anti-TNF therapy, anti-a4-b7 therapy, anti-IL12p40 therapy, JAK inhibitor, thalidomide, or cyclophosphamide, or a combination thereof.

14. The method of any one of the claim 8, 9, 12, or 13, wherein the therapeutic agent comprises ursodeoxycholic acid (UDCA), antipruritic, cholestyramine, antibiotic, vitamin A, vitamin D, vitamin E, or vitamin K, or a combination thereof.

15. A method for treating a subject having an inflammatory bowel disease, the method comprising administering to the subject a therapeutic agent, provided the subject has been determined to have a genotype comprising one or more single nucleotide polymorphisms selected from the group comprising rs10056322, rs6461986, and rs13421864.

16. The method of claim 15, wherein the subject has been determined to be at risk for developing arthritis.

17. A method for evaluating whether a subject having an inflammatory bowel disease will develop an extra-intestinal manifestation (EIM), the method comprising determining whether the subject has a genotype comprising one or more single nucleotide polymorphisms selected from the group comprising rs10056322, rs6461986, and rs13421864.

18. The method of claim 17, wherein the EIM comprises arthritis.

19. The method of claim 16 or 18, wherein the arthritis is peripheral arthritis.

20. The method of any one of claim 17-19, further comprising administering to the subject a therapeutic agent.

21. The method of any one of claim 15, 16, or 20, wherein the therapeutic agent comprises an anti-TL1A antibody, anti-CD30L antibody, glucocorticosteroid, anti-TNF therapy, anti-a4-b7 therapy, anti-IL12p40 therapy, JAK inhibitor, thalidomide, or cyclophosphamide, or a combination thereof.

22. The method of any one of claim 15, 16, 20, or 21, wherein the therapeutic agent comprises methotrexate, leflunomide, hydroxychloroquine, sulfasalazine, nonsteroidal anti-inflammatory drug (NSAID), TNF inhibitor, etanercept, infliximab, belimumab, rituximab, anakinra, tocilizumab, canakinumab, secukinumab, ustekinumab, ixekizumab, sarilumab, tofacitinib, abatacept, corticosteroid, prednisone, or cortisone, or a combination thereof.

23. A method for treating a subject having an inflammatory bowel disease, the method comprising administering to the subject a therapeutic agent, provided the subject has been determined to have a genotype comprising one or more single nucleotide polymorphisms selected from the group comprising rs4349859, rs4418214, rs3819299, rs2373969, rs4151651, and rs9366775.

24. The method of claim 23, wherein the subject has been determined to be at risk for developing an extra-intestinal manifestation (EIM) of the eye.

25. A method for evaluating whether a subject having an inflammatory bowel disease will develop an extra-intestinal manifestation (EIM), the method comprising determining whether the subject has a genotype comprising one or more single nucleotide polymorphisms selected from the group comprising rs4349859, rs4418214, rs3819299, rs2373969, rs4151651, and rs9366775.

26. The method of claim 24 or claim 25, wherein the EIM comprises uveitis, iritis, episcleritis, scleritis, or undiagnosed ocular inflammation, or a combination thereof.

27. The method of claim 25 or claim 26, further comprising administering to the subject a therapeutic agent.

28. The method of any one of claim 23, 24, or 27, wherein the therapeutic agent comprises an anti-TL1A antibody, anti-CD30L antibody, glucocorticosteroid, anti-TNF therapy, anti-a4-b7 therapy, anti-IL12p40 therapy, JAK inhibitor, thalidomide, or cyclophosphamide, or a combination thereof.

29. The method of any one of the claim 23, 24, 27, or 28, wherein the therapeutic agent comprises a steroid, methotrexate, mycophenolate, sulfasalazine, azathioprine, cyclosporine, adalimumab, infliximab, daclizumab, abatacept, or rituximab, or a combination thereof.

30. A method for treating a subject having an inflammatory bowel disease, the method comprising administering to the subject a therapeutic agent, provided the subject has been determined to have a genotype comprising one or more single nucleotide polymorphisms selected from the group comprising rs80079682, rs115994059, rs7297515, rs13166683, rs62376929, rs9305694, rs139009610, rs28732100, rs12199223, rs1265181, rs13417109, rs17026757, and rs117670930.

31. The method of claim 30, wherein the subject has been determined to be at risk for developing erythema nodosum, pyoderma gangrenosum, or psoriasis, or a combination thereof.

32. A method for evaluating whether a subject having an inflammatory bowel disease will develop an extra-intestinal manifestation (EIM), the method comprising determining whether the subject has a genotype comprising one or more single nucleotide polymorphisms selected from the group comprising rs80079682, rs115994059, rs7297515, rs13166683, rs62376929, rs9305694, rs139009610, rs28732100, rs12199223, rs1265181, rs13417109, rs17026757, and rs117670930.

33. The method of claim 32, wherein the EIM comprises erythema nodosum, pyoderma gangrenosum, or psoriasis, or a combination thereof.

34. The method of claim 32 or claim 33, further comprising administering to the subject a therapeutic agent.

35. The method of any one of claim 30, 31, or 34, wherein the therapeutic agent comprises an anti-TL1A antibody, anti-CD30L antibody, glucocorticosteroid, anti-TNF therapy, anti-a4-b7 therapy, anti-IL12p40 therapy, JAK inhibitor, thalidomide, or cyclophosphamide, or a combination thereof.

36. The method of any one of claim 30, 31, 34, or 35, wherein the therapeutic agent comprises an anti-inflammatory drug, cortisone, colchicine, potassium iodine, steroid, hydroxychloroquine, cyclosporin A, or thalidomide, or a combination thereof.

37. The method of any one of the claim 30, 31, or 34-36, wherein the therapeutic agent comprises a corticosteroid, a ciclosporin, infliximab, canakinumab, clobetasol, mupirocin, gentamicin, tacrolimus, mycophenolate mofetil, or thalidomide, or a combination thereof.

38. The method of any one of the claim 30, 31, or 34-37, wherein the therapeutic agent comprises a steroid, retinoid, methotrexate, adalimumab, brodalumab, certolizumab pegol, etanercept, guselkumab, infliximab, ixekizumab, risankizumab-rzaa, secukinumab, tildrakizumab, ustekinumab, or apremilast, or a combination thereof.

39. A method for treating a subject having an inflammatory bowel disease, the method comprising administering to the subject a therapeutic agent, provided the subject has been determined to have a genotype comprising one or more single nucleotide polymorphisms selected from the group comprising rs4349859, rs4463302, rs4418214, rs2069835, rs2516514, rs17030062, rs9305694, rs139009610, rs28732100, rs12199223, rs1265181, rs13417109, rs17026757, rs117670930, rs115994059, rs7297515, rs13166683, rs62376929, rs4418214, rs3819299, rs2373969, rs4151651, rs9366775, rs2858884, rs2858319, rs6917611, rs6930571, rs389419, rs76558762, rs7956721, rs887864, and rs9276424.

40. The method of claim 39, wherein the subject has been determined to be at risk for developing an extra-intestinal manifestation (EIM).

41. A method for evaluating whether a subject having an inflammatory bowel disease will develop an extra-intestinal manifestation (EIM), the method comprising determining whether the subject has a genotype comprising one or more single nucleotide polymorphisms selected from the group comprising rs4349859, rs4463302, rs4418214, rs2069835, rs2516514, rs17030062, rs9305694, rs139009610, rs28732100, rs12199223, rs1265181, rs13417109, rs17026757, rs117670930, rs115994059, rs7297515, rs13166683, rs62376929, rs4418214, rs3819299, rs2373969, rs4151651, rs9366775, rs2858884, rs2858319, rs6917611, rs6930571, rs389419, rs76558762, rs7956721, rs887864, and rs9276424.

42. The method of claim 40 or claim 41, wherein the EIM comprises ankylosing spondylitis, sacroiliitis, erythema nodosum, pyoderma gangrenosum, psoriasis, a manifestation in the eye, or primary sclerosing cholangitis, or a combination thereof.

43. The method of claim 41 or claim 42, further comprising administering to the subject a therapeutic agent.

44. The method of any one of claim 39, 40, or 43, wherein the therapeutic agent comprises an anti-TL1A antibody, anti-CD30L antibody, glucocorticosteroid, anti-TNF therapy, anti-a4-b7 therapy, anti-IL12p40 therapy, JAK inhibitor, thalidomide, or cyclophosphamide, or a combination thereof.

45. The method of any one of claim 39, 40, 43, or 44, wherein the therapeutic agent comprises an anti-inflammatory drug, cortisone, colchicine, potassium iodine, steroid, hydroxychloroquine, cyclosporin A, thalidomide, or a combination thereof.

46. The method of any one of the claim 39, 40, or 43-45, wherein the therapeutic agent comprises a corticosteroid, ciclosporin, infliximab, canakinumab, clobetasol, mupirocin, gentamicin, tacrolimus, mycophenolate mofetil, or thalidomide, or a combination thereof.

47. The method of any one of the claim 39, 40, or 43-46, wherein the therapeutic agent comprises a steroid, retinoid, methotrexate, adalimumab, brodalumab, certolizumab pegol, etanercept, guselkumab, infliximab, ixekizumab, risankizumab-rzaa, secukinumab, tildrakizumab, ustekinumab, or apremilast, or a combination thereof.

48. The method of any one of the claim 39, 40, or 43-47, wherein the therapeutic agent comprises a steroid, methotrexate, mycophenolate, sulfasalazine, azathioprine, cyclosporine, adalimumab, infliximab, daclizumab, abatacept, or rituximab, or a combination thereof.

49. The method of any one of the claim 39, 40, or 43-48, wherein the therapeutic agent comprises ursodeoxycholic acid (UDCA), antipruritic, cholestyramine, antibiotic, vitamin A, vitamin D, vitamin E, or vitamin K, or a combination thereof.

50. The method of any one of the claim 39, 40, or 43-49, wherein the therapeutic agent comprises etanercept, adalimumab, infliximab, cyclobenzaprine, steroid, secukinumab, methotrexate, leflunomide, hydroxychloroquine, or sulfasalazine, or a combination thereof.

51. A method for treating a subject having an inflammatory bowel disease, the method comprising administering to the subject a therapeutic agent, provided the subject has been determined to have a genotype comprising one or more single nucleotide polymorphisms selected from the group comprising rs61199332, rs7857730, rs497871, rs2516514, rs17030062, rs9305694, rs139009610, rs28732100, rs12199223, rs1265181, rs13417109, rs17026757, rs117670930, rs115994059, rs7297515, rs13166683, rs62376929, rs4418214, rs3819299, rs2373969, rs4151651, rs9366775, rs2858884, rs2858319, rs6917611, rs6930571, rs389419, rs76558762, rs7956721, rs887864, rs9276424, rs10056322, rs6461986, rs13421864, rs80079682, rs6905036, rs4349859, rs2844510, rs9276456, rs4463302, rs4418214, and rs2069835.

52. The method of claim 51, wherein the subject has been determined to be at risk for developing an extra-intestinal manifestation (EIM).

53. A method for evaluating whether a subject having an inflammatory bowel disease will develop an extra-intestinal manifestation (EIM), the method comprising determining whether the subject has a genotype comprising one or more single nucleotide polymorphisms selected from the group comprising rs61199332, rs7857730, rs497871, rs2516514, rs17030062, rs9305694, rs139009610, rs28732100, rs12199223, rs1265181, rs13417109, rs17026757, rs117670930, rs115994059, rs7297515, rs13166683, rs62376929, rs4418214, rs3819299, rs2373969, rs4151651, rs9366775, rs2858884, rs2858319, rs6917611, rs6930571, rs389419, rs76558762, rs7956721, rs887864, rs9276424, rs10056322, rs6461986, rs13421864, rs80079682, rs6905036, rs4349859, rs2844510, rs9276456, rs4463302, rs4418214, and rs2069835.

54. The method of claim 53, further comprising administering to the subject a therapeutic agent.

55. The method of any one of claim 51, 52, or 54, wherein the therapeutic agent comprises an anti-TL1A antibody, an anti-CD30L antibody, glucocorticosteroid, anti-TNF therapy, anti-a4-b7 therapy, anti-IL12p40 therapy, JAK inhibitor, thalidomide, or cyclophosphamide or a combination thereof.

56. The method of any one of claim 51, 52, 54, or 55, wherein the therapeutic agent comprises an anti-inflammatory drug, cortisone, colchicine, potassium iodine, steroid, hydroxychloroquine, cyclosporin A, thalidomide, or a combination thereof.

57. The method of any one of the claim 51, 52, or 54-56, wherein the therapeutic agent comprises a corticosteroid, ciclosporin, infliximab, canakinumab, clobetasol, mupirocin, gentamicin, tacrolimus, mycophenolate mofetil, or thalidomide, or a combination thereof.

58. The method of any one of the claim 51, 52, or 54-57, wherein the therapeutic agent comprises a steroid, retinoid, methotrexate, adalimumab, brodalumab, certolizumab pegol, guselkumab, infliximab, ixekizumab, risankizumab-rzaa, secukinumab, tildrakizumab, ustekinumab, or apremilast, or a combination thereof.

59. The method of any one of the claim 51, 52, or 54-58, wherein the therapeutic agent comprises a steroid, methotrexate, mycophenolate, sulfasalazine, azathioprine, cyclosporine, adalimumab, infliximab, daclizumab, abatacept, or rituximab, or a combination thereof.

60. The method of any one of the claim 51, 52, or 54-59, wherein the therapeutic agent comprises ursodeoxycholic acid (UDCA), antipruritic, cholestyramine, antibiotic, vitamin A, vitamin D, vitamin E, or vitamin K, or a combination thereof.

61. The method of any one of the claim 51, 52, or 54-60, wherein the therapeutic agent comprises methotrexate, leflunomide, hydroxychloroquine, sulfasalazine, a NSAID, TNF inhibitor, etanercept, infliximab, belimumab, rituximab, anakinra, tocilizumab, canakinumab, secukinumab, ustekinumab, ixekizumab sarilumab, tofacitinib, abatacept, corticosteroid, prednisone, cortisone, or a combination thereof.

62. The method of any one of the claim 51, 52, or 54-61, wherein the therapeutic agent comprises etanercept, adalimumab, infliximab, cyclobenzaprine, steroid, secukinumab, methotrexate, leflunomide hydroxychloroquine, or sulfasalazine, or a combination thereof.

63. The method of any one of claim 52-62, wherein the EIM comprises ankylosing spondylitis, sacroiliitis, erythema nodosum, pyoderma gangrenosum, psoriasis, a manifestation in the eye, primary sclerosing cholangitis, or peripheral arthritis, or a combination thereof.

64. The method of claim 63, wherein the EIM comprises ankylosing spondylitis and sacroiliitis.

65. The method of claim 63, wherein the EIM comprises erythema nodosum, pyoderma gangrenosum, and/or psoriasis.

66. The method of claim 63, wherein the EIM comprises the manifestation in the eye.

67. The method of claim 66, wherein the manifestation in the eye comprises uveitis, iritis, episcleritis, scleritis, or undiagnosed ocular inflammation, or a combination thereof.

68. The method of claim 63, wherein the EIM comprises primary sclerosing cholangitis.

69. The method of claim 63, wherein the EIM comprises peripheral arthritis.

70. The method of claim 63, wherein the arthritis comprises large joint arthritis, small joint arthritis, extracolonic arthritis, Crohn's disease/ulcerative colitis non-specific joint inflammation, or TBD-associated arthralgia complication, or a combination thereof.

71. The method of claim 63, wherein the EIM comprises ankylosing spondylitis, sacroiliitis, erythema nodosum, pyoderma gangrenosum, psoriasis, a manifestation in the eye, or primary sclerosing cholangitis, or a combination thereof.

72. The method of claim 63, wherein the EIM comprises ankylosing spondylitis, sacroiliitis, erythema nodosum, pyoderma gangrenosum, psoriasis, eye, peripheral arthritis, or primary sclerosing cholangitis, or a combination thereof.

73. The method of any one of claim 1-72, wherein the subject comprises a serological marker selected from the group comprising anti-neutrophil cytoplasmic antibodies (ANCA), anti-Saccharomyces cerevisiae antibodies (ASCA), anti-outer member porin C (anti-OmpC), anti-Pseudomonas fluorescens bacterial sequence 12 (anti-I2), and anti-bacterial flagellin (CBir1).

74. The method of any one of claim 1-73, wherein the inflammatory bowel disease comprises Crohn's disease.

75. The method of claim 74, wherein the subject has a Crohn's disease (CD) phenotype selected from the group comprising upper GI, colonic, small bowel, structuring, penetrating, structuring and penetrating, and perianal CD.

76. The method of any one of claim 1-75, wherein the subject has undergone surgery for treatment of the inflammatory bowel disease.

77. The method of any one of claim 1-76, wherein the inflammatory bowel disease comprises ulcerative colitis.

78. The method of any one of claim 1-77, wherein the subject is female.

79. The method of any one of claim 1-77, wherein the subject is male.

80. The method of any one of claim 1-79, wherein the subject is Jewish.

81. The method of any one of claim 1-80, wherein the subject is was diagnosed with inflammatory bowel disease before age 17.

82. The method of any one of claim 1-80, wherein the subject is was diagnosed with inflammatory bowel disease before age 10.

83. The method of any one of claim 1-82, wherein the subject is a smoker.

84. The method of any one of claim 1-83, further comprising determining whether the subject comprises the one or more single nucleotide polymorphisms.

The application's sequence listing, which the Patent Office published only in electronic form, follows.

SEQUENCE LISTING (20154 sequences)

SEQ ID NO: 1 - protein, 10 aa, Artificial Sequence
  Description of Artificial Sequence: Synthetic peptide
GFDIQDTYMH

SEQ ID NO: 2 - protein, 17 aa, Artificial Sequence
  Description of Artificial Sequence: Synthetic peptide
RIDPASGHTKYDPKFQV

SEQ ID NO: 3 - protein, 17 aa, Artificial Sequence
  Description of Artificial Sequence: Synthetic peptide
RIEPASGHIKYDPKFQG

SEQ ID NO: 4 - protein, 17 aa, Artificial Sequence
  Description of Artificial Sequence: Synthetic peptide
RIDPASGHIKYDPKFQG

SEQ ID NO: 5 - protein, 17 aa, Artificial Sequence
  Description of Artificial Sequence: Synthetic peptide
RIEPASGHIKYDPKFQV

SEQ ID NO: 6 - protein, 7 aa, Artificial Sequence
  Description of Artificial Sequence: Synthetic peptide
SGGLPDV

SEQ ID NO: 7 - protein, 9 aa, Artificial Sequence
  Description of Artificial Sequence: Synthetic peptide
ARSGGLPDV

SEQ ID NO: 8 - protein, 7 aa, Artificial Sequence
  Description of Artificial Sequence: Synthetic peptide
SGGLPDW

SEQ ID NO: 9 - protein, 9 aa, Artificial Sequence
  Description of Artificial Sequence: Synthetic peptide
ARSGGLPDW

SEQ ID NO: 10 - protein, 10 aa, Artificial Sequence
  Description of Artificial Sequence: Synthetic peptide
RASSSVSYMY

SEQ ID NO: 11 - protein, 7 aa, Artificial Sequence
  Description of Artificial Sequence: Synthetic peptide
ATSNLAS

SEQ ID NO: 12 - protein, 9 aa, Artificial Sequence
  Description of Artificial Sequence: Synthetic peptide
QQWEGNPRT

SEQ ID NO: 13 - protein, 9 aa, Artificial Sequence
  Description of Artificial Sequence: Synthetic peptide
QQWKGNPRT

SEQ ID NO: 14 - protein, 9 aa, Artificial Sequence
  Description of Artificial Sequence: Synthetic peptide
QQWSGNPRT

SEQ ID NO: 15 - protein, 9 aa, Artificial Sequence
  Description of Artificial Sequence: Synthetic peptide
QQWSRNPRT

SEQ ID NO: 16-100 - skipped (85 entries)

SEQ ID NO: 101 - protein, 116 aa, Artificial Sequence
  Description of Artificial Sequence: Synthetic polypeptide
QVQLVQSGAEVKKPGASVKVSCKASGFDIQDTYMHWVKQRPGQGLEWMGRIDPASGHTKYDPKFQVRVTITRDTSTSTVYMELSSLRSEDTAVYYCARSGGLPDVWGQGTTVTVSS

SEQ ID NO: 102 - protein, 116 aa, Artificial Sequence
  Description of Artificial Sequence: Synthetic polypeptide
QVQLVQSGAEVKKPGASVKVSCKASGFDIQDTYMHWVKQRPGQGLEWMGRIDPASGHTKYDPKFQVRVTMTRDTSTSTAYLELSSLRSEDTAVYYCARSGGLPDVWGQGTTVTVSS

SEQ ID NO: 103 - protein, 116 aa, Artificial Sequence
  Description of Artificial Sequence: Synthetic polypeptide
EVQLVQSGAEVKKPGASVKVSCKASGFDIQDTYMHWVRQRPGQGLEWIGRIDPASGHTKYDPKFQVRATITTDTSTSTAYLELSSLRSEDTAVYYCARSGGLPDVWGQGTTVTVSS

SEQ ID NO: 104 - protein, 116 aa, Artificial Sequence
  Description of Artificial Sequence: Synthetic polypeptide
QVQLVQSGAEVKKPGASVKVSCKASGFDIQDTYMHWVKQRPGQGLEWMGRIDPASGHTKYDPKFQVRVTITRDTSTSTVYLELSSLRSEDTAVYYCARSGGLPDVWGQGTTVTVSS

SEQ ID NO: 105 - protein, 116 aa, Artificial Sequence
  Description of Artificial Sequence: Synthetic polypeptide
QVQLVQSGAEVKKPGASVKVSCKASGFDIQDTYMHWVKQRPGQGLEWMGRIDPASGHTKYDPKFQVRATITRDTSTSTAYLELSSLRSEDTAVYYCARSGGLPDVWGQGTTVTVSS

SEQ ID NO: 106 - protein, 116 aa, Artificial Sequence
  Description of Artificial Sequence: Synthetic polypeptide
QVQLVQSGAEVKKPGASVKVSCKASGFDIQDTYMHWVRQRPGQGLEWMGRIDPASGHTKYDPKFQVRVTITTDTSTSTVYMELSSLRSEDTAVYYCARSGGLPDVWGQGTTVTVSS

SEQ ID NO: 107 - protein, 116 aa, Artificial Sequence
  Description of Artificial Sequence: Synthetic polypeptide
QVQLVQSGAEVKKPGASVKVSCKASGFDIQDTYMHWVRQRPGQGLEWIGRIDPASGHTKYDPKFQVRATITTDTSTSTAYLELSSLRSEDTAVYYCARSGGLPDVWGQGTTVTVSS

SEQ ID NO: 108 - protein, 116 aa, Artificial Sequence
  Description of Artificial Sequence: Synthetic polypeptide
QVQLVQSGAEVKKPGASVKVSCKASGFDIQDTYMHWVKQRPGQGLEWIGRIDPASGHTKYDPKFQVRATITTDTSTSTAYLELSSLRSEDTAVYYCARSGGLPDVWGQGTTVTVSS

SEQ ID NO: 109 - protein, 116 aa, Artificial Sequence
  Description of Artificial Sequence: Synthetic polypeptide
EVQLVQSGAEVKKPGASVKVSCKASGFDIQDTYMHWVKQRPGQGLEWIGRIDPASGHTKYDPKFQVRATITTDTSTSTAYLELSSLRSEDTAVYYCARSGGLPDVWGQGTTVTVSS

SEQ ID NO: 110 - protein, 116 aa, Artificial Sequence
  Description of Artificial Sequence: Synthetic polypeptide
QVQLVQSGAEVKKPGASVKVSCKASGFDIQDTYMHWVRQRPGQGLEWMGRIDPASGHTKYDPKFQVRVTITTDTSTSTAYLELSSLRSEDTAVYYCARSGGLPDVWGQGTTVTVSS

SEQ ID NO: 111 - protein, 116 aa, Artificial Sequence
  Description of Artificial Sequence: Synthetic polypeptide
QVQLVQSGAEVKKPGASVKVSCKASGFDIQDTYMHWVRQRPGQGLEWMGRIDPASGHTKYDPKFQVRVTITRDTSTSTAYLELSSLRSEDTAVYYCARSGGLPDVWGQGTTVTVSS

SEQ ID NO: 112 - protein, 116 aa, Artificial Sequence
  Description of Artificial Sequence: Synthetic polypeptide
QVQLVQSGAEVKKPGASVKVSCKASGFDIQDTYMHWVRQRPGQGLEWIGRIDPASGHTKYDPKFQVRVTITRDTSTSTAYLELSSLRSEDTAVYYCARSGGLPDVWGQGTTVTVSS

SEQ ID NO: 113 - protein, 116 aa, Artificial Sequence
  Description of Artificial Sequence: Synthetic polypeptide
QVQLVQSGAEVKKPGASVKVSCKASGFDIQDTYMHWVRQRPGQGLEWIGRIDPASGHTKYDPKFQVRATITRDTSTSTAYLELSSLRSEDTAVYYCARSGGLPDVWGQGTTVTVSS

SEQ ID NO: 114 - protein, 116 aa, Artificial Sequence
  Description of Artificial Sequence: Synthetic polypeptide
QVQLVQSGAEVKKPGASVKVSCKASGFDIQDTYMHWVKQRPGQGLEWMGRIDPASGHTKYDPKFQVRVTITRDTSTSTAYLELSSLRSEDTAVYYCARSGGLPDVWGQGTTVTVSS

SEQ ID NO: 115 - protein, 116 aa, Artificial Sequence
  Description of Artificial Sequence: Synthetic polypeptide
QVQLVQSGAEVKKPGASVKVSCKASGFDIQDTYMHWVKQRPGQGLEWIGRIDPASGHTKYDPKFQVRVTITTDTSTSTAYLELSSLRSEDTAVYYCARSGGLPDVWGQGTTVTVSS

SEQ ID NO: 116 - protein, 116 aa, Artificial Sequence
  Description of Artificial Sequence: Synthetic polypeptide
EVQLVQSGAEVKKPGASVKVSCKASGFDIQDTYMHWVKQAPGQGLEWMGRIEPASGHIKYDPKFQGRVTMTRDTSTSTVYMELSSLRSEDTAVYYCARSGGLPDWWGQGTTVTVSS

SEQ ID NO: 117 - protein, 116 aa, Artificial Sequence
  Description of Artificial Sequence: Synthetic polypeptide
QVQLVQSGAEVKKPGASVKVSCKASGFDIQDTYMHWVKQRPGQGLEWMGRIEPASGHIKYDPKFQGRVTMTRDTSTSTVYMELSSLRSEDTAVYYCARSGGLPDWWGQGTTVTVSS

SEQ ID NO: 118 - protein, 116 aa, Artificial Sequence
  Description of Artificial Sequence: Synthetic polypeptide
QVQLVQSGAEVKKPGASVKVSCKASGFDIQDTYMHWVKQRPGQGLEWMGRIDPASGHTKYDPKFQVRVTITTDTSTSTAYLELSSLRSEDTAVYYCARSGGLPDVWGQGTTVTVSS

SEQ ID NO: 119 - protein, 116 aa, Artificial Sequence
  Description of Artificial Sequence: Synthetic polypeptide
QVQLVQSGAEVKKPGASVKVSCKASGFDIQDTYMHWVKQRPGQGLEWMGRIDPASGHTKYDPKFQVRVTITRDTSTSTAYMELSSLRSEDTAVYYCARSGGLPDVWGQGTTVTVSS

SEQ ID NO: 120 - protein, 116 aa, Artificial Sequence
  Description of Artificial Sequence: Synthetic polypeptide
QVQLVQSGAEVKKPGASVKVSCKASGFDIQDTYMHWVKQRPGQGLEWIGRIDPASGHTKYDPKFQVRVTITRDTSTSTAYLELSSLRSEDTAVYYCARSGGLPDVWGQGTTVTVSS

SEQ ID NO: 121 - protein, 116 aa, Artificial Sequence
  Description of Artificial Sequence: Synthetic polypeptide
QVQLVQSGAEVKKPGASVKVSCKASGFDIQDTYMHWVRQAPGQGLEWMGRIEPASGHIKYDPKFQVRVTMTRDTSTSTVYMELSSLRSEDTAVYYCARSGGLPDWWGQGTTVTVSS

SEQ ID NO: 122 - protein, 116 aa, Artificial Sequence
  Description of Artificial Sequence: Synthetic polypeptide
QVQLVQSGAEVKKPGASVKVSCKASGFDIQDTYMHWVRQAPGQGLEWMGRIEPASGHIKYDPKFQVRATMTRDTSTSTVYMELSSLRSEDTAVYYCARSGGLPDWWGQGTTVTVSS

SEQ ID NO: 123 - protein, 116 aa, Artificial Sequence
  Description of Artificial Sequence: Synthetic polypeptide
QVQLVQSGAEVKKPGASVKVSCKASGFDIQDTYMHWVRQAPGQGLEWMGRIEPASGHIKYDPKFQVRVTITRDTSTSTVYMELSSLRSEDTAVYYCARSGGLPDWWGQGTTVTVSS

SEQ ID NO: 124 - protein, 116 aa, Artificial Sequence
  Description of Artificial Sequence: Synthetic polypeptide
QVQLVQSGAEVKKPGASVKVSCKASGFDIQDTYMHWVRQAPGQGLEWMGRIEPASGHIKYDPKFQVRATITRDTSTSTVYMELSSLRSEDTAVYYCARSGGLPDWWGQGTTVTVSS

SEQ ID NO: 125 - protein, 116 aa, Artificial Sequence
  Description of Artificial Sequence: Synthetic polypeptide
QVQLVQSGAEVKKPGASVKVSCKASGFDIQDTYMHWVKQAPGQGLEWMGRIEPASGHIKYDPKFQGRVTMTRDTSTSTVYMELSSLRSEDTAVYYCARSGGLPDWWGQGTTVTVSS

SEQ ID NO: 126 - protein, 116 aa, Artificial Sequence
  Description of Artificial Sequence: Synthetic polypeptide
QVQLVQSGAEVKKPGASVKVSCKASGFDIQDTYMHWVKQAPGQGLEWMGRIDPASGHIKYDPKFQGRVTMTRDTSTSTVYMELSSLRSEDTAVYYCARSGGLPDWWGQGTTVTVSS

SEQ ID NO: 127 - protein, 116 aa, Artificial Sequence
  Description of Artificial Sequence: Synthetic polypeptide
QVQLVQSGAEVKKPGASVKVSCKASGFDIQDTYMHWVKQAPGQGLEWMGRIEPASGHIKYDPKFQGRATMTRDTSTSTVYMELSSLRSEDTAVYYCARSGGLPDWWGQGTTVTVSS

SEQ ID NO: 128 - protein, 116 aa, Artificial Sequence
  Description of Artificial Sequence: Synthetic polypeptide
QVQLVQSGAEVKKPGASVKVSCKASGFDIQDTYMHWVRQAPGQGLEWMGRIEPASGHIKYDPKFQGRATMTRDTSTSTVYMELSSLRSEDTAVYYCARSGGLPDWWGQGTTVTVSS

SEQ ID NO: 129 - protein, 116 aa, Artificial Sequence
  Description of Artificial Sequence: Synthetic polypeptide
EVQLVQSGAEVKKPGASVKVSCKASGFDIQDTYMHWVRQAPGQGLEWMGRIEPASGHIKYDPKFQGRATMTRDTSTSTVYMELSSLRSEDTAVYYCARSGGLPDWWGQGTTVTVSS

SEQ ID NO: 130 - protein, 116 aa, Artificial Sequence
  Description of Artificial Sequence: Synthetic polypeptide
QVQLVQSGAEVKKPGASVKVSCKASGFDIQDTYMHWVRQAPGQGLEWMGRIDPASGHIKYDPKFQGRATMTRDTSTSTVYMELSSLRSEDTAVYYCARSGGLPDWWGQGTTVTVSS

SEQ ID NO: 131 - protein, 116 aa, Artificial Sequence
  Description of Artificial Sequence: Synthetic polypeptide
QVQLVQSGAEVKKPGASVKVSCKASGFDIQDTYMHWVRQAPGQGLEWMGRIEPASGHIKYDPKFQGRATITTDTSTSTVYMELSSLRSEDTAVYYCARSGGLPDWWGQGTTVTVSS

SEQ ID NO: 132 - protein, 116 aa, Artificial Sequence
  Description of Artificial Sequence: Synthetic polypeptide
QVQLVQSGAEVKKPGASVKVSCKASGFDIQDTYMHWVRQAPGQGLEWMGRIEPASGHIKYDPKFQGRATMTRDTSTSTAYMELSSLRSEDTAVYYCARSGGLPDWWGQGTTVTVSS

SEQ ID NO: 133 - protein, 116 aa, Artificial Sequence
  Description of Artificial Sequence: Synthetic polypeptide
QVQLVQSGAEVKKPGASVKVSCKASGFDIQDTYMHWVRQAPGQGLEWMGRIEPASGHIKYDPKFQGRVTMTRDTSTSTAYMELSSLRSEDTAVYYCARSGGLPDWWGQGTTVTVSS

SEQ ID NO: 134 - protein, 116 aa, Artificial Sequence
  Description of Artificial Sequence: Synthetic polypeptide
EVQLVQSGAEVKKPGASVKVSCKASGFDIQDTYMHWVRQAPGQGLEWMGRIEPASGHIKYDPKFQGRVTMTRDTSTSTAYMELSSLRSEDTAVYYCARSGGLPDWWGQGTTVTVSS

SEQ ID NO: 135 - protein, 116 aa, Artificial Sequence
  Description of Artificial Sequence: Synthetic polypeptide
QVQLVQSGAEVKKPGASVKVSCKASGFDIQDTYMHWVRQAPGQGLEWMGRIDPASGHIKYDPKFQGRVTMTRDTSTSTAYMELSSLRSEDTAVYYCARSGGLPDWWGQGTTVTVSS

SEQ ID NO: 136 - protein, 116 aa, Artificial Sequence
  Description of Artificial Sequence: Synthetic polypeptide
QVQLVQSGAEVKKPGASVKVSCKASGFDIQDTYMHWVRQAPGQGLEWMGRIEPASGHIKYDPKFQGRVTMTRDTSTSTVYMELSSLRSEDTAVYYCARSGGLPDWWGQGTTVTVSS

SEQ ID NO: 137 - protein, 116 aa, Artificial Sequence
  Description of Artificial Sequence: Synthetic polypeptide
DVQLVQSGAEVKKPGASVKVSCKASGFDIQDTYMHWVRQAPGQGLEWMGRIEPASGHIKYDPKFQGRVTMTRDTSTSTVYMELSSLRSEDTAVYYCARSGGLPDWWGQGTTVTVSS

SEQ ID NO: 138 - protein, 116 aa, Artificial Sequence
  Description of Artificial Sequence: Synthetic polypeptide
QVQLVQSGAEVKKPGASVKVSCKASGFDIQDTYMHWVKQAPGQGLEWIGRIDPASGHTKYDPKFQVRATITTDTSTSTAYLELSSLRSEDTAVYYCARSGGLPDVWGQGTTVTVSS

SEQ ID NO: 139 - protein, 116 aa, Artificial Sequence
  Description of Artificial Sequence: Synthetic polypeptide
QVQLVQSGAEVKKPGASVKVSCKASGFDIQDTYMHWVRQAPGQGLEWIGRIDPASGHTKYDPKFQVRATITTDTSTSTAYLELSSLRSEDTAVYYCARSGGLPDVWGQGTTVTVSS

SEQ ID NO: 140 - protein, 116 aa, Artificial Sequence
  Description of Artificial Sequence: Synthetic polypeptide
QVQLVQSGAEVKKPGASVKVSCKASGFDIQDTYMHWVKQRPGQGLEWMGRIDPASGHTKYDPKFQVRATITTDTSTSTAYLELSSLRSEDTAVYYCARSGGLPDVWGQGTTVTVSS

SEQ ID NO: 141 - protein, 116 aa, Artificial Sequence
  Description of Artificial Sequence: Synthetic polypeptide
QVQLVQSGAEVKKPGASVKVSCKASGFDIQDTYMHWVKQRPGQGLEWIGRIDPASGHTKYDPKFQVRATITTDTSTSTVYLELSSLRSEDTAVYYCARSGGLPDVWGQGTTVTVSS

SEQ ID NO: 142 - protein, 116 aa, Artificial Sequence
  Description of Artificial Sequence: Synthetic polypeptide
QVQLVQSGAEVKKPGASVKVSCKASGFDIQDTYMHWVKQRPGQGLEWIGRIDPASGHTKYDPKFQVRATITTDTSTSTAYMELSSLRSEDTAVYYCARSGGLPDVWGQGTTVTVSS

SEQ ID NO: 143 - protein, 116 aa, Artificial Sequence
  Description of Artificial Sequence: Synthetic polypeptide
QVQLVQSGAEVKKPGASVKVSCKASGFDIQDTYMHWVKQRPGQGLEWIGRIDPASGHTKYDPKFQVRATITTDTSTSTVYMELSSLRSEDTAVYYCARSGGLPDVWGQGTTVTVSS

SEQ ID NO: 144 - protein, 116 aa, Artificial Sequence
  Description of Artificial Sequence: Synthetic polypeptide
QVQLVQSGAEVKKPGASVKVSCKASGFDIQDTYMHWVKQRPGQGLEWIGRIDPASGHTKYDPKFQVRATMTTDTSTSTAYLELSSLRSEDTAVYYCARSGGLPDVWGQGTTVTVSS

SEQ ID NO: 145 - protein, 116 aa, Artificial Sequence
  Description of Artificial Sequence: Synthetic polypeptide
QVQLVQSGAEVKKPGASVKVSCKASGFDIQDTYMHWVKQRPGQGLEWIGRIDPASGHTKYDPKFQVRATITRDTSTSTAYLELSSLRSEDTAVYYCARSGGLPDVWGQGTTVTVSS

SEQ ID NO: 146 - protein, 116 aa, Artificial Sequence
  Description of Artificial Sequence: Synthetic polypeptide
QVQLVQSGAEVKKPGASVKVSCKASGFDIQDTYMHWVKQRPGQGLEWIGRIDPASGHTKYDPKFQVRVTMTTDTSTSTAYLELSSLRSEDTAVYYCARSGGLPDVWGQGTTVTVSS

SEQ ID NO: 147 - protein, 116 aa, Artificial Sequence
  Description of Artificial Sequence: Synthetic polypeptide
QVQLVQSGAEVKKPGASVKVSCKASGFDIQDTYMHWVKQRPGQGLEWIGRIDPASGHTKYDPKFQVRATMTRDTSTSTAYLELSSLRSEDTAVYYCARSGGLPDVWGQGTTVTVSS

SEQ ID NO: 148 - protein, 116 aa, Artificial Sequence
  Description of Artificial Sequence: Synthetic polypeptide
QVQLVQSGAEVKKPGASVKVSCKASGFDIQDTYMHWVKQRPGQGLEWIGRIDPASGHTKYDPKFQVRVTMTRDTSTSTAYLELSSLRSEDTAVYYCARSGGLPDVWGQGTTVTVSS

SEQ ID NO: 149 - protein, 116 aa, Artificial Sequence
  Description of Artificial Sequence: Synthetic polypeptide
DVQLVQSGAEVKKPGASVKVSCKASGFDIQDTYMHWVKQRPGQGLEWIGRIDPASGHTKYDPKFQVRATITTDTSTSTAYLELSSLRSEDTAVYYCARSGGLPDVWGQGTTVTVSS

SEQ ID NO: 150 - protein, 116 aa, Artificial Sequence
  Description of Artificial Sequence: Synthetic polypeptide
QVQLVQSGAEVKKPGASVKVSCKASGFDIQDTYMHWVRQRPGQGLEWMGRIEPASGHIKYDPKFQGRVTMTRDTSTSTVYMELSSLRSEDTAVYYCARSGGLPDWWGQGTTVTVSS

SEQ ID NO: 151 - protein, 116 aa, Artificial Sequence
  Description of Artificial Sequence: Synthetic polypeptide
QVQLVQSGAEVKKPGASVKVSCKASGFDIQDTYMHWVRQAPGQGLEWMGRIDPASGHIKYDPKFQGRVTMTRDTSTSTVYMELSSLRSEDTAVYYCARSGGLPDWWGQGTTVTVSS

SEQ ID NO: 152 - protein, 116 aa, Artificial Sequence
  Description of Artificial Sequence: Synthetic polypeptide
QVQLVQSGAEVKKPGASVKVSCKASGFDIQDTYMHWVRQAPGQGLEWIGRIEPASGHIKYDPKFQGRVTMTRDTSTSTVYMELSSLRSEDTAVYYCARSGGLPDWWGQGTTVTVSS

SEQ ID NO: 153 - protein, 116 aa, Artificial Sequence
  Description of Artificial Sequence: Synthetic polypeptide
QVQLVQSGAEVKKPGASVKVSCKASGFDIQDTYMHWVRQAPGQGLEWIGRIDPASGHIKYDPKFQGRVTMTRDTSTSTVYMELSSLRSEDTAVYYCARSGGLPDWWGQGTTVTVSS

SEQ ID NO: 154 - protein, 116 aa, Artificial Sequence
  Description of Artificial Sequence: Synthetic polypeptide
QVQLVQSGAEVKKPGASVKVSCKASGFDIQDTYMHWVRQAPGQGLEWMGRIEPASGHVKYDPKFQGRVTMTRDTSTSTVYMELSSLRSEDTAVYYCARSGGLPDWWGQGTTVTVSS

SEQ ID NO: 155 - protein, 116 aa, Artificial Sequence
  Description of Artificial Sequence: Synthetic polypeptide
QVQLVQSGAEVKKPGASVKVSCKASGFDIQDTYMHWVRQAPGQGLEWMGRIEPASGHIKYDPKFQGRVTITRDTSTSTVYMELSSLRSEDTAVYYCARSGGLPDWWGQGTTVTVSS

SEQ ID NO: 156 - protein, 116 aa, Artificial Sequence
  Description of Artificial Sequence: Synthetic polypeptide
EVQLVQSGAEVKKPGASVKVSCKASGFDIQDTYMHWVRQAPGQGLEWMGRIEPASGHIKYDPKFQGRVTMTRDTSTSTVYMELSSLRSEDTAVYYCARSGGLPDWWGQGTTVTVSS

SEQ ID NO: 157 - protein, 116 aa, Artificial Sequence
  Description of Artificial Sequence: Synthetic polypeptide
QVQLVQSGAEVKKPGASVKVSCKASGFDIQDTYMHWVRQAPGQGLEWMGRIEPASGHIKYDPKFQGRVTMTTDTSTSTVYMELSSLRSEDTAVYYCARSGGLPDWWGQGTTVTVSS

SEQ ID NO: 158 - protein, 116 aa, Artificial Sequence
  Description of Artificial Sequence: Synthetic polypeptide
QVQLVQSGAEVKKPGASVKVSCKASGFDIQDTYMHWVRQAPGQGLEWMGRIEPASGHIKYDPKFQGRVTITTDTSTSTVYMELSSLRSEDTAVYYCARSGGLPDWWGQGTTVTVSS

SEQ ID NO: 159 - protein, 116 aa, Artificial Sequence
  Description of Artificial Sequence: Synthetic polypeptide
QVQLVQSGAEVKKPGASVKVSCKASGFDIQDTYMHWVRQAPGQGLEWMGRIEPASGHTKYDPKFQGRVTMTRDTSTSTVYMELSSLRSEDTAVYYCARSGGLPDWWGQGTTVTVSS

SEQ ID NO: 160 - protein, 116 aa, Artificial Sequence
  Description of Artificial Sequence: Synthetic polypeptide
QVQLVQSGAEVKKPGASVKVSCKASGFDIQDTYMHWVRQAPGQGLEWMGRIEPASGHIKYDPKFQGRATITRDTSTSTVYMELSSLRSEDTAVYYCARSGGLPDWWGQGTTVTVSS

SEQ ID NO: 161 - protein, 116 aa, Artificial Sequence
  Description of Artificial Sequence: Synthetic polypeptide
QVQLVQSGAEVKKPGASVKVSCKASGFDIQDTYMHWVRQAPGQGLEWMGRIEPASGHIKYDPKFQGRVTMTRDTSTSTVYLELSSLRSEDTAVYYCARSGGLPDWWGQGTTVTVSS

SEQ ID NO: 162 - protein, 116 aa, Artificial Sequence
  Description of Artificial Sequence: Synthetic polypeptide
QVQLVQSGAEVKKPGASVKVSCKASGFDIQDTYMHWVRQAPGQGLEWMGRIEPASGHIKYDPKFQGRVTMTRDTSTSTAYLELSSLRSEDTAVYYCARSGGLPDWWGQGTTVTVSS

SEQ ID NO: 163 - protein, 116 aa, Artificial Sequence
  Description of Artificial Sequence: Synthetic polypeptide
QVQLVQSGAEVKKPGASVKVSCKASGFDIQDTYMHWVRQRPGQGLEWMGRIDPASGHTKYDPKFQVRATITTDTSTSTAYLELSSLRSEDTAVYYCARSGGLPDVWGQGTTVTVSS

SEQ ID NO: 164 - protein, 116 aa, Artificial Sequence
  Description of Artificial Sequence: Synthetic polypeptide
QVQLVQSGAEVKKPGASVKVSCKASGFDIQDTYMHWVRQRPGQGLEWIGRIDPASGHTKYDPKFQVRVTITTDTSTSTAYLELSSLRSEDTAVYYCARSGGLPDVWGQGTTVTVSS

SEQ ID NO: 165 - protein, 116 aa, Artificial Sequence
  Description of Artificial Sequence: Synthetic polypeptide
QVQLVQSGAEVKKPGASVKVSCKASGFDIQDTYMHWVRQRPGQGLEWMGRIDPASGHTKYDPKFQVRVTITTDTSTSTVYLELSSLRSEDTAVYYCARSGGLPDVWGQGTTVTVSS

SEQ ID NO: 166 - protein, 116 aa, Artificial Sequence
  Description of Artificial Sequence: Synthetic polypeptide
QVQLVQSGAEVKKPGASVKVSCKASGFDIQDTYMHWVRQRPGQGLEWMGRIDPASGHTKYDPKFQVRVTITTDTSTSTAYMELSSLRSEDTAVYYCARSGGLPDVWGQGTTVTVSS

SEQ ID NO: 167 - protein, 116 aa, Artificial Sequence
  Description of Artificial Sequence: Synthetic polypeptide
QVQLVQSGAEVKKPGASVKVSCKASGFDIQDTYMHWVRQRPGQGLEWMGRIDPASGHTKYDPKFQVRVTMTTDTSTSTAYLELSSLRSEDTAVYYCARSGGLPDVWGQGTTVTVSS

SEQ ID NO: 168 - protein, 116 aa, Artificial Sequence
  Description of Artificial Sequence: Synthetic polypeptide
QVQLVQSGAEVKKPGASVKVSCKASGFDIQDTYMHWVRQAPGQGLEWMGRIDPASGHIKYDPKFQGRATITTDTSTSTVYMELSSLRSEDTAVYYCARSGGLPDWWGQGTTVTVSS

SEQ ID NO: 169 - protein, 116 aa, Artificial Sequence
  Description of Artificial Sequence: Synthetic polypeptide
EVQLVQSGAEVKKPGASVKVSCKASGFDIQDTYMHWVRQAPGQGLEWMGRIEPASGHIKYDPKFQGRATITTDTSTSTVYMELSSLRSEDTAVYYCARSGGLPDWWGQGTTVTVSS

SEQ ID NO: 170-200 - skipped (31 entries)

SEQ ID NO: 201 - protein, 106 aa, Artificial Sequence
  Description of Artificial Sequence: Synthetic polypeptide
EIVLTQSPGTLSLSPGERATLSCRASSSVSYMYWYQQKPGQAPRPLIYATSNLASGIPDRFSGSGSGTDFTLTISRLEPEDFAVYYCQQWEGNPRTFGGGTKLEIK

SEQ ID NO: 202 - protein, 106 aa, Artificial Sequence
  Description of Artificial Sequence: Synthetic polypeptide
EIVLTQSPGTLSLSPGERATLSCRASSSVSYMYWYQQKPGQAPRLLIYATSNLASGIPDRFSGSGSGTDFTLTISRLEPEDFAVYYCQQWEGNPRTFGGGTKLEIK

SEQ ID NO: 203 - protein, 106 aa, Artificial Sequence
  Description of Artificial Sequence: Synthetic polypeptide
EIVLTQSPGTLSLSPGERATLSCRASSSVSYMYWYQQKPGQAPRLLIYATSNLASGIPDRFSGSGSGTDFTLTISRLEPEDFAVYYCQQWSGNPRTFGGGTKLEIK

SEQ ID NO: 204 - protein, 106 aa, Artificial Sequence
  Description of Artificial Sequence: Synthetic polypeptide
EIVLTQSPGTLSLSPGERATLSCRASSSVSYMYWYQQKPGQAPRLLIYATSNLASGIPDRFSGSGSGTDFTLTISRLEPEDFAVYYCQQWKGNPRTFGGGTKLEIK

SEQ ID NO: 205 - protein, 106 aa, Artificial Sequence
  Description of Artificial Sequence: Synthetic polypeptide
EIVLTQSPGTLSLSPGERATLSCRASSSVSYMYWYQQKPGQAPRPWIYATSNLASGIPDRFSGSGSGTDFTLTISRLEPEDFAVYYCQQWEGNPRTFGGGTKLEIK

SEQ ID NO: 206 - protein, 106 aa, Artificial Sequence
  Description of Artificial Sequence: Synthetic polypeptide
EIVLTQSPGTLSLSPGERATLSCRASSSVSYMYWYQQKPGQAPRPLIYATSNLASGIPDRFSGSGSGTDFTLTISRLEPEDFAVYYCQQWKGNPRTFGGGTKLEIK

SEQ ID NO: 207 - protein, 106 aa, Artificial Sequence
  Description of Artificial Sequence: Synthetic polypeptide
EIVLTQSPGTLSLSPGERATLSCRASSSVSYMYWYQQKPGQAPRLLIYATSNLASGIPDRFSGSGSGTDFTLTISRLEPEDFAVYYCQQWSRNPRTFGGGTKLEIK

SEQ ID NO: 208 - protein, 106 aa, Artificial Sequence
  Description of Artificial Sequence: Synthetic polypeptide
EIVLTQSPGTLSASPGERATMSCRASSSVSYMYWYQQKPGQAPRPWIYATSNLASGVPDRFSGSGSGTDYTLTISRVEPEDFAVYYCQQWSGNPRTFGGGTKLEIK

SEQ ID NO: 209 - protein, 106 aa, Artificial Sequence
  Description of Artificial Sequence: Synthetic polypeptide
EIVLTQSPGTLSLSPGERATLSCRASSSVSYMYWYQQKPGQAPRLLIYATSNLASGVPDRFSGSGSGTDFTLTISRLEPEDFAVYYCQQWEGNPRTFGGGTKLEIK

SEQ ID NO: 210 - protein, 106 aa, Artificial Sequence
  Description of Artificial Sequence: Synthetic polypeptide
EIVLTQSPGTLSASPGERATLSCRASSSVSYMYWYQQKPGQAPRPWIYATSNLASGVPDRFSGSGSGTDYTLTISRVEPEDFAVYYCQQWSGNPRTFGGGTKLEIK

SEQ ID NO: 211 - protein, 106 aa, Artificial Sequence
  Description of Artificial Sequence: Synthetic polypeptide
EIVLTQSPGTLSASPGERATMSCRASSSVSYMYWYQQKPGQAPRLLIYATSNLASGVPDRFSGSGSGTDYTLTISRVEPEDFAVYYCQQWSGNPRTFGGGTKLEIK

SEQ ID NO: 212 - protein, 106 aa, Artificial Sequence
  Description of Artificial Sequence: Synthetic polypeptide
EIVLTQSPGTLSASPGERATMSCRASSSVSYMYWYQQKPGQAPRPWIYATSNLASGVPDRFSGSGSGTDFTLTISRVEPEDFAVYYCQQWSGNPRTFGGGTKLEIK

SEQ ID NO: 213 - protein, 106 aa, Artificial Sequence
  Description of Artificial Sequence: Synthetic polypeptide
EIVLTQSPGTLSASPGERATMSCRASSSVSYMYWYQQKPGQAPRPWIYATSNLASGVPDRFSGSGSGTDYTLTISRLEPEDFAVYYCQQWSGNPRTFGGGTKLEIK

SEQ ID NO: 214 - protein, 106 aa, Artificial Sequence
  Description of Artificial Sequence: Synthetic polypeptide
EIVLTQSPGTLSASPGERATMSCRASSSVSYMYWYQQKPGQAPRPWIYATSNLASGVPDRFSGSGSGTDFTLTISRLEPEDFAVYYCQQWSGNPRTFGGGTKLEIK

SEQ ID NO: 215 - protein, 106 aa, Artificial Sequence
  Description of Artificial Sequence: Synthetic polypeptide
EIVLTQSPGTLSASPGERATMSCRASSSVSYMYWYQQKPGQAPRPWIYATSNLASGIPDRFSGSGSGTDYTLTISRVEPEDFAVYYCQQWSGNPRTFGGGTKLEIK

SEQ ID NO: 216 - protein, 106 aa, Artificial Sequence
  Description of Artificial Sequence: Synthetic polypeptide
EIVLTQSPGTLSLSPGERATLSCRASSSVSYMYWYQQKPGQAPRLLIYATSNLASGIPDRFSGSGSGTDYTLTISRLEPEDFAVYYCQQWEGNPRTFGGGTKLEIK

SEQ ID NO: 217 - protein, 106 aa, Artificial Sequence
  Description of Artificial Sequence: Synthetic polypeptide
EIVLTQSPGTLSLSPGERATLSCRASSSVSYMYWYQQKPGQAPRLLIYATSNLASGIPDRFSGSGSGTDFTLTISRVEPEDFAVYYCQQWEGNPRTFGGGTKLEIK

SEQ ID NO: 218 - protein, 106 aa, Artificial Sequence
  Description of Artificial Sequence: Synthetic polypeptide
EIVLTQSPGTLSLSPGERATLSCRASSSVSYMYWYQQKPGQAPRLLIYATSNLASGIPDRFSGSGSGTDYTLTISRVEPEDFAVYYCQQWEGNPRTFGGGTKLEIK

SEQ ID NO: 219 - protein, 106 aa, Artificial Sequence
  Description of Artificial Sequence: Synthetic polypeptide
EIVLTQSPGTLSASPGERATLSCRASSSVSYMYWYQQKPGQAPRLLIYATSNLASGIPDRFSGSGSGTDFTLTISRLEPEDFAVYYCQQWEGNPRTFGGGTKLEIK

SEQ ID NO: 220 - protein, 106 aa, Artificial Sequence
  Description of Artificial Sequence: Synthetic polypeptide
EIVLTQSPGTMSLSPGERATLSCRASSSVSYMYWYQQKPGQAPRLLIYATSNLASGIPDRFSGSGSGTDFTLTISRLEPEDFAVYYCQQWEGNPRTFGGGTKLEIK

SEQ ID NO: 221-300 - skipped (80 entries)

SEQ ID NO: 301 - protein, 124 aa, Artificial Sequence
  Description of Artificial Sequence: Synthetic polypeptide
  MOD_RES (1)..(1): Any amino acid
  MOD_RES (26)..(35): This region may encompass one of the following sequences: "GFDIQDTYMH" or "DTYMH" or "KYDIN" or "GFEIQDTYMH" or "GFDPQDTYMH" or "GFDVQDTYMH" or "GFDIGDTYMH" or "GFDISDTYMH" or "GFDIVDTYMH" or "GFDIQDAYMH" or "GFDIQDSYMH" or "GFDIQDTFMH"
  MOD_RES (26)..(35): CONT. FROM ABOVE: or "GFDIQDTYIH" or "GFDLQDTYMH" or "GFDIQDTYLH" or "GFDIGDTFIH" or "GFDIGDTFMH" or "GFDIGDTYIH" or "GFDIQDTFIH" or "GFDIQDTFMH" or "GFDIQDTYIH" or "GFDISDTFIH" or "GFDISDTFMH" or "GFDISDTYIH" or "GFDISDTYMH" or "GFDIVDTFIH" or "GFDIVDTFMH"
  MOD_RES (26)..(35): CONT. FROM ABOVE: or "GFDIVDTYIH" or "GFDPGDTFIH" or "GFDPGDTFMH" or "GFDPGDTYIH" or "GFDPGDTYMH" or "GFDPQDTFIH" or "GFDPQDTFMH" or "GFDPQDTYIH" or "GFDPQDTYMH" or "GFDPSDTFIH" or "GFDPSDTFMH" or "GFDPSDTYIH" or "GFDPSDTYMH" or "GFDPVDTFIH" or "GFDPVDTFMH"
  MOD_RES (26)..(35): CONT. FROM ABOVE: or "GFDPVDTYIH" or "GFDPVDTYMH" or "GFDVGDTFIH" or "GFDVGDTFMH" or "GFDVGDTYIH" or "GFDVGDTYMH" or "GFDVQDTFIH" or "GFDVQDTFMH" or "GFDVQDTYIH" or "GFDVSDTFIH" or "GFDVSDTFMH" or "GFDVSDTYIH" or "GFDVSDTYMH" or "GFDVVDTFIH" or
  MOD_RES (26)..(35): CONT. FROM ABOVE: "GFEPSDTYMH" or "GFEPVDTFIH" or "GFDVVDTFMH" or "GFDVVDTYIH" or "GFDVVDTYMH" or "GFEIGDTFIH" or "GFEIGDTFMH" or "GFEIGDTYIH" or "GFEIGDTYMH" or "GFEIQDTFIH" or "GFEIQDTFMH" or "GFEIQDTYIH" or "GFEIQDTYMH" or "GFEISDTFIH" or "GFEISDTFMH"
  MOD_RES (26)..(35): CONT. FROM ABOVE: or "GFEISDTYIH" or "GFEISDTYMH" or "GFEIVDTFIH" or "GFEIVDTFMH" or "GFEIVDTYIH" or "GFEIVDTYMH" or "GFEPGDTFIH" or "GFEPGDTFMH" or "GFEPGDTYIH" or "GFEPGDTYMH" or "GFEPQDTFIH" or "GFEPQDTFMH" or "GFEPQDTYIH" or "GFEPQDTYMH" or "GFEPSDTFIH"
  MOD_RES (26)..(35): CONT. FROM ABOVE: or "GFEPSDTFMH" or "GFEPSDTYIH" or "GFEPVDTFMH" or "GFEPVDTYIH" or "GFEPVDTYMH" or "GFEVGDTFIH" or "GFEVGDTFMH" or "GFEVGDTYIH" or "GFEVGDTYMH" or "GFEVQDTFIH" or "GFEVQDTFMH" or "GFEVQDTYIH" or "GFEVQDTYMH" or "GFEVSDTFIH" or "GFEVSDTFMH"
  MOD_RES (26)..(35): CONT. FROM ABOVE: or "GFEVSDTYIH" or "GFEVSDTYMH" or "GFEVVDTFIH" or "GFEVVDTFMH" or "GFEVVDTYIH" or "GFEVVDTYMH" or "GFTFSSYW" or "GGSFTGFY" or "GYDFTYYGIS" or "SRSYYWG" or "TSNMGVV" or "LYGMN" or "NYGMN" or "GYTFTSSWMH" or "GYTFTSYDIN" or "SYFWS" or "GYYWN"
  MOD_RES (26)..(35): CONT. FROM ABOVE: or "GFTFSTYG" or "TYGMS"
  MOD_RES (38)..(38): Any amino acid
  MOD_RES (40)..(40): Any amino acid
  MOD_RES (48)..(48): Any amino acid
  MOD_RES (50)..(66): This region may encompass one of the following sequences: "RIDPASGHTKYDPKFQV" or "RIEPASGHIKYDPKFQG" or "RIDPASGHIKYDPKFQG" or "RIEPASGHIKYDPKFQV" or "WIFPGDGRTDYNEKFKG" or "RLDPASGHTK" or "RIEPASGHTK" or "RIDPESGHTK" or "RIDPASGHTK"
  MOD_RES (50)..(66): CONT. FROM ABOVE: or "YDPKFQA" or "YDPKFQD" or "RIDPAGGHTK" or "RIDPASAHTK" or "RIDPASGHIK" or "RIDPASGHLK" or "RIDPASGHVK" or "YDPKFQV" or "IDPKFQV" or "LDPKFQV" or "MDPKFQV" or "SDPKFQV" or "TDPKFQV" or "VDPKFQV" or "YIPKFQV" or "YNPKFQV" or "YRPKFQV" or
  MOD_RES (50)..(66): CONT. FROM ABOVE: "YSPKFQV" or "YDPKFRV" or "YDPKFQE" or "YDPKFQG" or "YDPKFQH" or "YDPKFQK" or "YDPKFQL" or "YDPKFQM" or "YDPKFQN" or "YDPKFQP" or "YDPKFQR" or "YDPKFQS" or "YDPKFQT" or "RIEPASGHIKYDPKFQG" or "RIEPASGHIKYSPKFQG" or "RIEPASGHVKYSPKFQV"
  MOD_RES (50)..(66): CONT. FROM ABOVE: or "RIEPASGHVKYDPKFQT" or "RIDPASGHIKYDPKFQK" or "RIDPASGHVKIDPKFQV" or "RIDPASGHLKYDPKFQV" or "RIDPASGHLKYDPKFQR" or "RIDPASGHLKYDPKFQN" or "RIEPASGHLKYDPKFQE" or "PASGH" or "RIDPASGHTKYDPKFQV" or "RIDPASGHLKYDPKFQG" or "RIDPASGHTKYDPKFQG"
  MOD_RES (50)..(66): CONT. FROM ABOVE: or "RIDPASGHSKYDPKFQV" or "RIDPASGHYKYDPKFQV" or "IKEDGSEK" or "INHRGNT" or "WISTYNGNTHYARMLQG" or "SIYYNGRTYYNPSLKS" or "HILWDDREYSNPALKS" or "WINTYTGEPTYADDFKG" or "IHPNSGGT" or "YIYYSGNTKYNPSLKS" or "EINHAGNTNYNPSLKS" or
  MOD_RES (50)..(66): CONT. FROM ABOVE:"ISGTGRTT" or "WMNTYSGVTTYADDFKG"
  MOD_RES (68)..(68): Any amino acid
  MOD_RES (70)..(70): Any amino acid
  MOD_RES (72)..(72): Any amino acid
  MOD_RES (79)..(79): Any amino acid
  MOD_RES (81)..(81): Any amino acid
  MOD_RES (99)..(113): This region may encompass one of the following sequences: "SGGLPDV" or "ARSGGLPDV" or "SGGLPDW" or "ARSGGLPDW" or "YGPAMDY" or "LGGLPDV" or "SAGLPDV" or "SGGAPDV" or "SGGMPDV" or "SGGLPEV" or "SGGLPDK" or "SGGLPDM" or "SGGLPDQ" or "SGGLPDR" or
  MOD_RES (99)..(113): CONT. FROM ABOVE: "SGGLPDS" or "SGGLPDT" or "SGGLPDH" or "SGGLPDF" or "SGGSPDV" or "ARSGGLPDM" or "ARSGGLPDK" or "SGGLPD" or "ARSGGLPDF" or "ARSGGLPDL" or "SGGLPDE" or "SGGLPDI" or "SGGLPDK" or "SGGLPDL" or "SGGLPDM" or "SGGLPDQ" or "SGGLPDT" or
  MOD_RES (99)..(113): CONT. FROM ABOVE: "SGGLPDW" or "SGGLPDY" or "SGGMPDE" or "SGGMPDI" or "SGGMPDK" or "SGGMPDL" or "SGGMPDM" or "SGGMPDQ" or "SGGMPDT" or "SGGMPDV" or "SGGMPDW" or "SGGMPDY" or "AREDYDSYYKYGMDV" or "ASPFYDFWSGSDY" or "ENYYGSGAYRGGMDV" or
  MOD_RES (99)..(113): CONT. FROM ABOVE: "EDYGDYGAFDI" or "MSRNYYGSSYVMDY" or "DTAMDYAMAY" or "DYGKYGDYYAMDY" or "ARGDYYGYVSWFAY" or "EVPETAAFEY" or "ETGSYYGFDY" or "GYCRSTTCYFDY" or "TKERGDYYYGVFDY" or "EGYVFDDYYATDY"
  See specification as filed for detailed description of substitutions and preferred embodiments
XVQLVQSGAEVKKPGASVKVSCKASXXXXXXXXXXWVXQXPGQGLEWXGXXXXXXXXXXXXXXXXXRXTXTXDTSTSTXYXELSSLRSEDTAVYYCARXXXXXXXXXXXXXXXWGQGTTVTVSS

SEQ ID NO: 302 - protein, 122 aa, Artificial Sequence
  Description of Artificial Sequence: Synthetic polypeptide
  MOD_RES (1)..(1): Any amino acid
  MOD_RES (26)..(35): This region may encompass one of the following sequences: "GFDIQDTYMH" or "DTYMH" or "KYDIN" or "GFEIQDTYMH" or "GFDPQDTYMH" or "GFDVQDTYMH" or "GFDIGDTYMH" or "GFDISDTYMH" or "GFDIVDTYMH" or "GFDIQDAYMH" or "GFDIQDSYMH" or "GFDIQDTFMH"
  MOD_RES (26)..(35): CONT. FROM ABOVE: or "GFDIQDTYIH" or "GFDLQDTYMH" or "GFDIQDTYLH" or "GFDIGDTFIH" or "GFDIGDTFMH" or "GFDIGDTYIH" or "GFDIQDTFIH" or "GFDIQDTFMH" or "GFDIQDTYIH" or "GFDISDTFIH" or "GFDISDTFMH" or "GFDISDTYIH" or "GFDISDTYMH" or "GFDIVDTFIH" or "GFDIVDTFMH"
  MOD_RES (26)..(35): CONT. FROM ABOVE: or "GFDIVDTYIH" or "GFDPGDTFIH" or "GFDPGDTFMH" or "GFDPGDTYIH" or "GFDPGDTYMH" or "GFDPQDTFIH" or "GFDPQDTFMH" or "GFDPQDTYIH" or "GFDPQDTYMH" or "GFDPSDTFIH" or "GFDPSDTFMH" or "GFDPSDTYIH" or "GFDPSDTYMH" or "GFDPVDTFIH" or "GFDPVDTFMH"
  MOD_RES (26)..(35): CONT. FROM ABOVE: or "GFDPVDTYIH" or "GFDPVDTYMH" or "GFDVGDTFIH" or "GFDVGDTFMH" or "GFDVGDTYIH" or "GFDVGDTYMH" or "GFDVQDTFIH" or "GFDVQDTFMH" or "GFDVQDTYIH" or "GFDVSDTFIH" or "GFDVSDTFMH" or "GFDVSDTYIH" or "GFDVSDTYMH" or "GFDVVDTFIH" or
  MOD_RES (26)..(35): CONT. FROM ABOVE: "GFEPSDTYMH" or "GFEPVDTFIH" or "GFDVVDTFMH" or "GFDVVDTYIH" or "GFDVVDTYMH" or "GFEIGDTFIH" or "GFEIGDTFMH" or "GFEIGDTYIH" or "GFEIGDTYMH" or "GFEIQDTFIH" or "GFEIQDTFMH" or "GFEIQDTYIH" or "GFEIQDTYMH" or "GFEISDTFIH" or "GFEISDTFMH"
  MOD_RES (26)..(35): CONT. FROM ABOVE: or "GFEISDTYIH" or "GFEISDTYMH" or "GFEIVDTFIH" or "GFEIVDTFMH" or "GFEIVDTYIH" or "GFEIVDTYMH" or "GFEPGDTFIH" or "GFEPGDTFMH" or "GFEPGDTYIH" or "GFEPGDTYMH" or "GFEPQDTFIH" or "GFEPQDTFMH" or "GFEPQDTYIH" or "GFEPQDTYMH" or "GFEPSDTFIH"
  MOD_RES (26)..(35): CONT. FROM ABOVE: or "GFEPSDTFMH" or "GFEPSDTYIH" or "GFEPVDTFMH" or "GFEPVDTYIH" or "GFEPVDTYMH" or "GFEVGDTFIH" or "GFEVGDTFMH" or "GFEVGDTYIH" or "GFEVGDTYMH" or "GFEVQDTFIH" or "GFEVQDTFMH" or "GFEVQDTYIH" or "GFEVQDTYMH" or "GFEVSDTFIH" or "GFEVSDTFMH"
  MOD_RES (26)..(35): CONT. FROM ABOVE: or "GFEVSDTYIH" or "GFEVSDTYMH" or "GFEVVDTFIH" or "GFEVVDTFMH" or "GFEVVDTYIH" or "GFEVVDTYMH" or "GFTFSSYW" or "GGSFTGFY" or "GYDFTYYGIS" or "SRSYYWG" or "TSNMGVV" or "LYGMN" or "NYGMN" or "GYTFTSSWMH" or "GYTFTSYDIN" or "SYFWS" or "GYYWN"
  MOD_RES (26)..(35): CONT. FROM ABOVE: or "GFTFSTYG" or "TYGMS"
  MOD_RES (38)..(38): Any amino acid
  MOD_RES (40)..(40): Any amino acid
  MOD_RES (48)..(48): Any amino acid
  MOD_RES (50)..(66): This region may encompass one of the following sequences: "RIDPASGHTKYDPKFQV" or "RIEPASGHIKYDPKFQG" or "RIDPASGHIKYDPKFQG" or "RIEPASGHIKYDPKFQV" or "WIFPGDGRTDYNEKFKG" or "RLDPASGHTK" or "RIEPASGHTK" or "RIDPESGHTK" or "RIDPASGHTK"
  MOD_RES (50)..(66): CONT. FROM ABOVE: or "YDPKFQA" or "YDPKFQD" or "RIDPAGGHTK" or "RIDPASAHTK" or "RIDPASGHIK" or "RIDPASGHLK" or "RIDPASGHVK" or "YDPKFQV" or "IDPKFQV" or "LDPKFQV" or "MDPKFQV" or "SDPKFQV" or "TDPKFQV" or "VDPKFQV" or "YIPKFQV" or "YNPKFQV" or "YRPKFQV" or
  MOD_RES (50)..(66): CONT. FROM ABOVE: "YSPKFQV" or "YDPKFRV" or "YDPKFQE" or "YDPKFQG" or "YDPKFQH" or "YDPKFQK" or "YDPKFQL" or "YDPKFQM" or "YDPKFQN" or "YDPKFQP" or "YDPKFQR" or "YDPKFQS" or "YDPKFQT" or "RIEPASGHIKYDPKFQG" or "RIEPASGHIKYSPKFQG" or "RIEPASGHVKYSPKFQV"
  MOD_RES (50)..(66): CONT. FROM ABOVE: or "RIEPASGHVKYDPKFQT" or "RIDPASGHIKYDPKFQK" or "RIDPASGHVKIDPKFQV" or "RIDPASGHLKYDPKFQV" or "RIDPASGHLKYDPKFQR" or "RIDPASGHLKYDPKFQN" or "RIEPASGHLKYDPKFQE" or "PASGH" or "RIDPASGHTKYDPKFQV" or "RIDPASGHLKYDPKFQG" or "RIDPASGHTKYDPKFQG"
  MOD_RES (50)..(66): CONT. FROM ABOVE: or "RIDPASGHSKYDPKFQV" or "RIDPASGHYKYDPKFQV" or "IKEDGSEK" or "INHRGNT" or "WISTYNGNTHYARMLQG" or "SIYYNGRTYYNPSLKS" or "HILWDDREYSNPALKS" or "WINTYTGEPTYADDFKG" or "IHPNSGGT" or "YIYYSGNTKYNPSLKS" or "EINHAGNTNYNPSLKS" or
  MOD_RES (50)..(66): CONT. FROM ABOVE:"ISGTGRTT" or "WMNTYSGVTTYADDFKG"
  MOD_RES (68)..(68): Any amino acid
  MOD_RES (70)..(70): Any amino acid
  MOD_RES (72)..(72): Any amino acid
  MOD_RES (79)..(79): Any amino acid
  MOD_RES (81)..(81): Any amino acid
  MOD_RES (97)..(111): This region may encompass one of the following sequences: "SGGLPDV" or "ARSGGLPDV" or "SGGLPDW" or "ARSGGLPDW" or "YGPAMDY" or "LGGLPDV" or "SAGLPDV" or "SGGAPDV" or "SGGMPDV" or "SGGLPEV" or "SGGLPDK" or "SGGLPDM" or "SGGLPDQ" or "SGGLPDR" or
  MOD_RES (97)..(111): CONT. FROM ABOVE: "SGGLPDS" or "SGGLPDT" or "SGGLPDH" or "SGGLPDF" or "SGGSPDV" or "ARSGGLPDM" or "ARSGGLPDK" or "SGGLPD" or "ARSGGLPDF" or "ARSGGLPDL" or "SGGLPDE" or "SGGLPDI" or "SGGLPDK" or "SGGLPDL" or "SGGLPDM" or "SGGLPDQ" or "SGGLPDT" or
  MOD_RES (97)..(111): CONT. FROM ABOVE: "SGGLPDW" or "SGGLPDY" or "SGGMPDE" or "SGGMPDI" or "SGGMPDK" or "SGGMPDL" or "SGGMPDM" or "SGGMPDQ" or "SGGMPDT" or "SGGMPDV" or "SGGMPDW" or "SGGMPDY" or "AREDYDSYYKYGMDV" or "ASPFYDFWSGSDY" or "ENYYGSGAYRGGMDV" or
  MOD_RES (97)..(111): CONT. FROM ABOVE: "EDYGDYGAFDI" or "MSRNYYGSSYVMDY" or "DTAMDYAMAY" or "DYGKYGDYYAMDY" or "ARGDYYGYVSWFAY" or "EVPETAAFEY" or "ETGSYYGFDY" or "GYCRSTTCYFDY" or "TKERGDYYYGVFDY" or "EGYVFDDYYATDY"
  See specification as filed for detailed description of substitutions and preferred embodiments
XVQLVQSGAEVKKPGASVKVSCKASXXXXXXXXXXWVXQXPGQGLEWXGXXXXXXXXXXXXXXXXXRXTXTXDTSTSTXYXELSSLRSEDTAVYYCXXXXXXXXXXXXXXXWGQGTTVTVSS

SEQ ID NO: 303 - protein, 112 aa, Artificial Sequence
  Description of Artificial Sequence: Synthetic polypeptide
  MOD_RES (24)..(39): This region may encompass one of the following sequences: "RASSSVSYMY" or "RSSQTIVHSNGDTYLD" or "GASSSVSYMY" or "WASSSVSYMY" or "RASSSVIYMY" or "RASSSVSFMY" or "RASSSVSYLY" or "RASSSVSYMR" or "GASSSVSYMY" or "ASSSVSYMY" or "QSILYSSNNKNY"
  MOD_RES (24)..(39): CONT. FROM ABOVE: or "QSLVHSDGNTY" or "RASQSVSSYLA" or "RASQGISSALA" or "SASSSVNYMH" or "KSSQNIVHSDGNTYLE" or "RSSQSIVHSNGNTYLD" or "QNINVL" or "RASQSINNYLN" or "RASQSVRSSYLA" or "QTISSW" or "RSSQNIVHSDGNTYLE"
  MOD_RES (51)..(52): Any amino acid
  MOD_RES (55)..(61): This region may encompass one of the following sequences: "ATSNLAS" or "KVSNRFS" or "AKSNLAS" or "ATPNLAS" or "ATENLAS" or "ATSLLAS" or "ATSPLAS" or "ATSNLTS" or "WAS" or "KIS" or "DASNRAT" or "DASSLES" or "STSNLAS" or "KVSNRFS" or "KAS" or
  MOD_RES (55)..(61): CONT. FROM ABOVE: "GYYNRPS" or "AASSLQS" or "GASSRAT" or "AAS" or "KVSNRFS"
  MOD_RES (94)..(102): This region may encompass one of the following sequences: "QQWEGNPRT" or "QQWKGNPRT" or "QQWSGNPRT" or "QQWSRNPRT" or "FQGSHVPYT" or "HQWSGNPRT" or "NQWSGNPRT" or "SQWSGNPRT" or "QQSSGNPRT" or "QQWDGNPRT" or "QQWHGNPRT" or "QQWNGNPRT" or
  MOD_RES (94)..(102): CONT. FROM ABOVE: "QQWQGNPRT" or "QQWVGNPRT" or "QQWSANPRT" or "QQWSDNPRT" or "QQWSQNPRT" or "QQWSSNPRT" or "QQWSGNPRS" or "QQFSGNPRT" or "QQHSGNPRT" or "QQISGNPRT" or "QQPSGNPRT" or "QQRSGNPRT" or "QQYSGNPRT" or "QQWSGHPRT" or "QQWSGLPRT"
  MOD_RES (94)..(102): CONT. FROM ABOVE: or "QQWSGQPRT" or "QQWSGSPRT" or "QQWSGTPRT" or "QQWSGMPRT" or "QQWSGFPRT" or "QQWSGKPRT" or "QQWSGRPRT" or "QQWSGDPRT" or "QQWAGNPRT" or "QQWYGNPRT" or "QQWFGNPRT" or "QQWQGNPRT" or "GNPRT" or "SQWSGNPRT" or "QQWSGNPRS"
  MOD_RES (94)..(102): CONT. FROM ABOVE: or "QQWSGTPRT" or "QQWSGDPRT" or "QQWSGFPRT" or "QQWSGKPRT" or "QQWSGRPRT" or "QQWSGSPRT" or "QQWDADPRT" or "QQWDAFPRT" or "QQWDAKPRT" or "QQWDANPRT" or "QQWDARPRT" or "QQWDASPRT" or "QQWDATPRT" or "QQWDGDPRT" or "QQWDGFPRT"
  MOD_RES (94)..(102): CONT. FROM ABOVE: or "QQWDGKPRT" or "QQWDGNPRT" or "QQWDGRPRT" or "QQWDGSPRT" or "QQWDGTPRT" or "QQWEADPRT" or "QQWEAFPRT" or "QQWEAKPRT" or "QQWEANPRT" or "QQWEARPRT" or "QQWEASPRT" or "QQWEATPRT" or "QQWEGDPRT" or "QQWEGFPRT" or "QQWEGKPRT" or
  MOD_RES (94)..(102): CONT. FROM ABOVE: "QQWEGRPRT" or "QQWEGSPRT" or "QQWEGTPRT" or "QQWHADPRT" or "QQWHAFPRT" or "QQWHAKPRT" or "QQWHANPRT" or "QQWHARPRT" or "QQWHASPRT" or "QQWHATPRT" or "QQWHGDPRT" or "QQWHGFPRT" or "QQWHGKPRT" or "QQWHGNPRT" or "QQWHGRPRT" or
  MOD_RES (94)..(102): CONT. FROM ABOVE: "QQWHGSPRT" or "QQWHGTPRT" or "QQWNADPRT" or "QQWNAFPRT" or "QQWNAKPRT" or "QQWNANPRT" or "QQWNARPRT" or "QQWNASPRT" or "QQWNATPRT" or "QQWNGDPRT" or "QQWNGFPRT" or "QQWNGKPRT" or "QQWNGNPRT" or "QQWNGRPRT" or "QQWNGSPRT" or
  MOD_RES (94)..(102): CONT. FROM ABOVE: "QQWNGTPRT" or "QQWQADPRT" or "QQWQAFPRT" or "QQWQAKPRT" or "QQWQANPRT" or "QQWQARPRT" or "QQWQASPRT" or "QQWQATPRT" or "QQWQGDPRT" or "QQWQGFPRT" or "QQWQGKPRT" or "QQWQGRPRT" or "QQWQGSPRT" or "QQWQGTPRT" or "QQWSADPRT" or
  MOD_RES (94)..(102): CONT. FROM ABOVE: "QQWSAFPRT" or "QQWSAKPRT" or "QQWSANPRT" or "QQWSARPRT" or "QQWSASPRT" or "QQWSATPRT" or "NQWDAFPRT" or "NQWDAKPRT" or "NQWDANPRT" or "NQWDARPRT" or "NQWDASPRT" or "NQWDATPRT" or "NQWDGDPRT" or "NQWDGFPRT" or "NQWDGKPRT" or
  MOD_RES (94)..(102): CONT. FROM ABOVE: "NQWDGNPRT" or "NQWDGRPRT" or "NQWDGSPRT" or "NQWDGTPRT" or "NQWEADPRT" or "NQWEAFPRT" or "NQWEAKPRT" or "NQWEANPRT" or "NQWEARPRT" or "NQWEASPRT" or "NQWEATPRT" or "NQWEGDPRT" or "NQWEGFPRT" or "NQWEGKPRT" or "NQWEGNPRT" or
  MOD_RES (94)..(102): CONT. FROM ABOVE: "NQWEGRPRT" or "NQWEGSPRT" or "NQWEGTPRT" or "NQWHADPRT" or "NQWHAFPRT" or "NQWHAKPRT" or "NQWHANPRT" or "NQWHARPRT" or "NQWHASPRT" or "NQWHATPRT" or "NQWHGDPRT" or "NQWHGFPRT" or "NQWHGKPRT" or "NQWHGNPRT" or "NQWHGRPRT" or
  MOD_RES (94)..(102): CONT. FROM ABOVE: "NQWHGSPRT" or "NQWHGTPRT" or "NQWNADPRT" or "NQWNAFPRT" or "NQWNAKPRT" or "NQWNANPRT" or "NQWNARPRT" or "NQWNASPRT" or "NQWNATPRT" or "NQWNGDPRT" or "NQWNGFPRT" or "NQWNGKPRT" or "NQWNGNPRT" or "NQWNGRPRT" or "NQWNGSPRT" or
  MOD_RES (94)..(102): CONT. FROM ABOVE: "NQWNGTPRT" or "NQWQADPRT" or "NQWQAFPRT" or "NQWQAKPRT" or "NQWQANPRT" or "NQWQARPRT" or "NQWQASPRT" or "NQWQATPRT" or "NQWQGDPRT" or "NQWQGFPRT" or "NQWQGKPRT" or "NQWQGNPRT" or "NQWQGRPRT" or "NQWQGSPRT" or "NQWQGTPRT" or
  MOD_RES (94)..(102): CONT. FROM ABOVE: "NQWSADPRT" or "NQWSAFPRT" or "NQWSAKPRT" or "NQWSANPRT" or "NQWSARPRT" or "NQWSASPRT" or "NQWSATPRT" or "NQWSGDPRT" or "NQWSGFPRT" or "NQWSGKPRT" or "NQWSGNPRT" or "NQWSGRPRT" or "NQWSGSPRT" or "NQWSGTPRT" or "QQYYSTPFT" or
  MOD_RES (94)..(102): CONT. FROM ABOVE: "MQATQFPLT" or "QQRSNWPWT" or "QQFNSYPLT" or "HQWNNYGT" or "FQGSHVPLT" or "QQGQSYPYT" or "QQSYSTPRT" or "QQYGSSPT" or "QQYHRSWT" or "FQGSHVPLT"
  See specification as filed for detailed description of substitutions and preferred embodiments
EIVLTQSPGTLSLSPGERATLSCXXXXXXXXXXXXXXXXWYQQKPGQAPRXXIYXXXXXXXGIPDRFSGSGSGTDFTLTISRLEPEDFAVYYCXXXXXXXXXFGGGTKLEIK

SEQ ID NO: 304 - protein, 25 aa, Artificial Sequence [sequence omitted]

SEQ ID NO: 305 - protein, 14 aa, Artificial Sequence
  Description of Artificial Sequence: Synthetic peptide
WVKQRPGQGLEWMG

SEQ ID NO: 306 - protein, 32 aa, Artificial Sequence
  Description of Artificial Sequence: Synthetic polypeptide
RVTITRDTSTSTVYLELSSLRSEDTAVYYCAR

SEQ ID NO: 307 - protein, 30 aa, Artificial Sequence
  Description of Artificial Sequence: Synthetic polypeptide
RVTITRDTSTSTVYLELSSLRSEDTAVYYC

SEQ ID NO: 308 - protein, 11 aa, Artificial Sequence
  Description of Artificial Sequence: Synthetic peptide
WGQGTTVTVSS

SEQ ID NO: 309 - protein, 23 aa, Artificial Sequence
  Description of Artificial Sequence: Synthetic peptide
EIVLTQSPGTLSLSPGERATLSC

SEQ ID NO: 310 - protein, 15 aa, Artificial Sequence
  Description of Artificial Sequence: Synthetic peptide
WYQQKPGQAPRPLIY

SEQ ID NO: 311 - protein, 32 aa, Artificial Sequence
  Description of Artificial Sequence: Synthetic polypeptide
GIPDRFSGSGSGTDFTLTISRLEPEDFAVYYC

SEQ ID NO: 312 - protein, 10 aa, Artificial Sequence
  Description of Artificial Sequence: Synthetic peptide
FGGGTKLEIK

SEQ ID NO: 313 - protein, 14 aa, Artificial Sequence
  Description of Artificial Sequence: Synthetic peptide
WVRQRPGQGLEWIG

SEQ ID NO: 314 - protein, 32 aa, Artificial Sequence
  Description of Artificial Sequence: Synthetic polypeptide
RATITTDTSTSTAYLELSSLRSEDTAVYYCAR

SEQ ID NO: 315 - protein, 30 aa, Artificial Sequence
  Description of Artificial Sequence: Synthetic polypeptide
RATITTDTSTSTAYLELSSLRSEDTAVYYC

SEQ ID NO: 316 - protein, 98 aa, Artificial Sequence
  Description of Artificial Sequence: Synthetic polypeptide
QVQLVQSGAEVKKPGASVKVSCKASGYTFNSYYMHWVRQAPGQGLEWMGIINPSGGSTSYAQKFQGRVTMTRDTSTSTVYMELSSLRSEDTAVYYCAR

SEQ ID NO: 317 - protein, 96 aa, Artificial Sequence
  Description of Artificial Sequence: Synthetic polypeptide
EIVLTQSPGTLSLSPGERATLSCRASQSVSSSYLAWYQQKPGQAPRLLIYGASSRATGIPDRFSGSGSGTDFTLTISRLEPEDFAVYYCQQYGSSP

SEQ ID NO: 318 - skipped

SEQ ID NO: 319 - protein, 107 aa, Artificial Sequence [sequence omitted]

SEQ ID NO: 320 - protein, 330 aa, Homo sapiens [sequence omitted]

SEQ ID NO: 321 - protein, 330 aa, Unknown
  Description of Unknown: IgG1 constant region sequence
ASTKGPSVFPLAPSSKSTSGGTAALGCLVKDYFPEPVTVSWNSGALTSGVHTFPAVLQSSGLYSLSSVVTVPSSSLGTQTYICNVNHKPSNTKVDKRVEPKSCDKTHTCPPCPAPELLGGPSVFLFPPKPKDTLMISRTPEVTCVVVDVSHEDPEVKFNWYVDGVEVHNAKTKPREEQYNSTYRVVSVLTVLHQDWLNGKEYKCKVSNKALPAPIEKTISKAKGQPREPQVYTLPPSREEMTKNQVSLTCLVKGFYPSDIAVEWESNGQPENNYKTTPPVLDSDGSFFLYSKLTVDKSRWQQGNVFSCSVMHEALHNHYTQKSLSLSPGK

SEQ ID NO: 322 - protein, 330 aa, Unknown
  Description of Unknown: IgG1 constant region sequence
ASTKGPSVFPLAPSSKSTSGGTAALGCLVKDYFPEPVTVSWNSGALTSGVHTFPAVLQSSGLYSLSSVVTVPSSSLGTQTYICNVNHKPSNTKVDKKVEPKSCDKTHTCPPCPAPELLGGPSVFLFPPKPKDTLMISRTPEVTCVVVDVSHEDPEVKFNWYVDGVEVHNAKTKPREEQYNSTYRVVSVLTVLHQDWLNGKEYKCKVSNKALPAPIEKTISKAKGQPREPQVYTLPPSREEMTKNQVSLTCLVKGFYPSDIAVEWESNGQPENNYKTTPPVLDSDGSFFLYSKLTVDKSRWQQGNVFSCSVMHEALHNHYTQKSLSLSPGK

SEQ ID NO: 323 - protein, 330 aa, Artificial Sequence
  Description of Artificial Sequence: Synthetic polypeptide
ASTKGPSVFPLAPSSKSTSGGTAALGCLVKDYFPEPVTVSWNSGALTSGVHTFPAVLQSSGLYSLSSVVTVPSSSLGTQTYICNVNHKPSNTKVDKKVEPKSCDKTHTCPPCPAPELEGGPSVFLFPPKPKDTLMISRTPEVTCVVVDVSHEDPEVKFNWYVDGVEVHNAKTKPREEQYNSTYRVVSVLTVLHQDWLNGKEYKCKVSNKALPAPIEKTISKAKGQPREPQVYTLPPSRDELTKNQVSLTCLVKGFYPSDIAVEWESNGQPENNYKTTPPVLDSDGSFFLYSKLTVDKSRWQQGNVFSCSVMHEALHNHYTQKSLSLSPGK

SEQ ID NO: 324 - protein, 330 aa, Artificial Sequence
  Description of Artificial Sequence: Synthetic polypeptide
ASTKGPSVFPLAPSSKSTSGGTAALGCLVKDYFPEPVTVSWNSGALTSGVHTFPAVLQSSGLYSLSSVVTVPSSSLGTQTYICNVNHKPSNTKVDKRVEPKSCDKTHTCPPCPAPELEGGPSVFLFPPKPKDTLMISRTPEVTCVVVDVSHEDPEVKFNWYVDGVEVHNAKTKPREEQYNSTYRVVSVLTVLHQDWLNGKEYKCKVSNKALPAPIEKTISKAKGQPREPQVYTLPPSREEMTKNQVSLTCLVKGFYPSDIAVEWESNGQPENNYKTTPPVLDSDGSFFLYSKLTVDKSRWQQGNVFSCSVMHEALHNHYTQKSLSLSPGK

SEQ ID NO: 325 - protein, 330 aa, Artificial Sequence
  Description of Artificial Sequence: Synthetic polypeptide
ASTKGPSVFPLAPSSKSTSGGTAALGCLVKDYFPEPVTVSWNSGALTSGVHTFPAVLQSSGLYSLSSVVTVPSSSLGTQTYICNVNHKPSNTKVDKKVEPKSCDKTHTCPPCPAPELEGGPSVFLFPPKPKDTLMISRTPEVTCVVVDVSHEDPEVKFNWYVDGVEVHNAKTKPREEQYNSTYRVVSVLTVLHQDWLNGKEYKCKVSNKALPAPIEKTISKAKGQPREPQVYTLPPSREEMTKNQVSLTCLVKGFYPSDIAVEWESNGQPENNYKTTPPVLDSDGSFFLYSKLTVDKSRWQQGNVFSCSVMHEALHNHYTQKSLSLSPGK

SEQ ID NO: 326 - protein, 330 aa, Artificial Sequence
  Description of Artificial Sequence: Synthetic polypeptide
ASTKGPSVFPLAPSSKSTSGGTAALGCLVKDYFPEPVTVSWNSGALTSGVHTFPAVLQSSGLYSLSSVVTVPSSSLGTQTYICNVNHKPSNTKVDKKVEPKSCDKTHTCPPCPAPEAAGGPSVFLFPPKPKDTLMISRTPEVTCVVVDVSHEDPEVKFNWYVDGVEVHNAKTKPREEQYNSTYRVVSVLTVLHQDWLNGKEYKCKVSNKALPAPIEKTISKAKGQPREPQVYTLPPSRDELTKNQVSLTCLVKGFYPSDIAVEWESNGQPENNYKTTPPVLDSDGSFFLYSKLTVDKSRWQQGNVFSCSVMHEALHNHYTQKSLSLSPGK

SEQ ID NO: 327 - protein, 330 aa, Artificial Sequence
  Description of Artificial Sequence: Synthetic polypeptide
ASTKGPSVFPLAPSSKSTSGGTAALGCLVKDYFPEPVTVSWNSGALTSGVHTFPAVLQSSGLYSLSSVVTVPSSSLGTQTYICNVNHKPSNTKVDKRVEPKSCDKTHTCPPCPAPEAAGGPSVFLFPPKPKDTLMISRTPEVTCVVVDVSHEDPEVKFNWYVDGVEVHNAKTKPREEQYNSTYRVVSVLTVLHQDWLNGKEYKCKVSNKALPAPIEKTISKAKGQPREPQVYTLPPSREEMTKNQVSLTCLVKGFYPSDIAVEWESNGQPENNYKTTPPVLDSDGSFFLYSKLTVDKSRWQQGNVFSCSVMHEALHNHYTQKSLSLSPGK

SEQ ID NO: 328 - protein, 330 aa, Artificial Sequence
  Description of Artificial Sequence: Synthetic polypeptide
ASTKGPSVFPLAPSSKSTSGGTAALGCLVKDYFPEPVTVSWNSGALTSGVHTFPAVLQSSGLYSLSSVVTVPSSSLGTQTYICNVNHKPSNTKVDKKVEPKSCDKTHTCPPCPAPEAAGGPSVFLFPPKPKDTLMISRTPEVTCVVVDVSHEDPEVKFNWYVDGVEVHNAKTKPREEQYNSTYRVVSVLTVLHQDWLNGKEYKCKVSNKALPAPIEKTISKAKGQPREPQVYTLPPSREEMTKNQVSLTCLVKGFYPSDIAVEWESNGQPENNYKTTPPVLDSDGSFFLYSKLTVDKSRWQQGNVFSCSVMHEALHNHYTQKSLSLSPGK

SEQ ID NO: 329 - protein, 329 aa, Artificial Sequence
  Description of Artificial Sequence: Synthetic polypeptide
ASTKGPSVFPLAPSSKSTSGGTAALGCLVKDYFPEPVTVSWNSGALTSGVHTFPAVLQSSGLYSLSSVVTVPSSSLGTQTYICNVNHKPSNTKVDKKVEPKSCDKTHTCPPCPAPEAAGAPSVFLFPPKPKDTLMISRTPEVTCVVVDVSHEDPEVKFNWYVDGVEVHNAKTKPREEQYNSTYRVVSVLTVLHQDWLNGKEYKCKVSNKALPAPIEKTISKAKGQPREPQVYTLPPSRDELTKNQVSLTCLVKGFYPSDIAVEWESNGQPENNYKTTPPVLDSDGSFFLYSKLTVDKSRWQQGNVFSCSVMHEALHNHYTQKSLSLSPG

SEQ ID NO: 330 - protein, 329 aa, Artificial Sequence
  Description of Artificial Sequence: Synthetic polypeptide
ASTKGPSVFPLAPSSKSTSGGTAALGCLVKDYFPEPVTVSWNSGALTSGVHTFPAVLQSSGLYSLSSVVTVPSSSLGTQTYICNVNHKPSNTKVDKRVEPKSCDKTHTCPPCPAPEAAGAPSVFLFPPKPKDTLMISRTPEVTCVVVDVSHEDPEVKFNWYVDGVEVHNAKTKPREEQYNSTYRVVSVLTVLHQDWLNGKEYKCKVSNKALPAPIEKTISKAKGQPREPQVYTLPPSREEMTKNQVSLTCLVKGFYPSDIAVEWESNGQPENNYKTTPPVLDSDGSFFLYSKLTVDKSRWQQGNVFSCSVMHEALHNHYTQKSLSLSPG

SEQ ID NO: 331 - protein, 329 aa, Artificial Sequence
  Description of Artificial Sequence: Synthetic polypeptide
ASTKGPSVFPLAPSSKSTSGGTAALGCLVKDYFPEPVTVSWNSGALTSGVHTFPAVLQSSGLYSLSSVVTVPSSSLGTQTYICNVNHKPSNTKVDKKVEPKSCDKTHTCPPCPAPEAAGAPSVFLFPPKPKDTLMISRTPEVTCVVVDVSHEDPEVKFNWYVDGVEVHNAKTKPREEQYNSTYRVVSVLTVLHQDWLNGKEYKCKVSNKALPAPIEKTISKAKGQPREPQVYTLPPSREEMTKNQVSLTCLVKGFYPSDIAVEWESNGQPENNYKTTPPVLDSDGSFFLYSKLTVDKSRWQQGNVFSCSVMHEALHNHYTQKSLSLSPG

SEQ ID NO: 332 - protein, 330 aa, Artificial Sequence
  Description of Artificial Sequence: Synthetic polypeptide
ASTKGPSVFPLAPSSKSTSGGTAALGCLVKDYFPEPVTVSWNSGALTSGVHTFPAVLQSSGLYSLSSVVTVPSSSLGTQTYICNVNHKPSNTKVDKKVEPKSCDKTHTCPPCPAPEAAGGPSVFLFPPKPKDTLMISRTPEVTCVVVDVSHEDPEVKFNWYVDGVEVHNAKTKPREEQYNSTYRVVSVLTVLHQDWLNGKEYKCKVSNKALGAPIEKTISKAKGQPREPQVYTLPPSRDELTKNQVSLTCLVKGFYPSDIAVEWESNGQPENNYKTTPPVLDSDGSFFLYSKLTVDKSRWQQGNVFSCSVMHEALHNHYTQKSLSLSPGK

SEQ ID NO: 333 - protein, 330 aa, Artificial Sequence
  Description of Artificial Sequence: Synthetic polypeptide
ASTKGPSVFPLAPSSKSTSGGTAALGCLVKDYFPEPVTVSWNSGALTSGVHTFPAVLQSSGLYSLSSVVTVPSSSLGTQTYICNVNHKPSNTKVDKRVEPKSCDKTHTCPPCPAPEAAGGPSVFLFPPKPKDTLMISRTPEVTCVVVDVSHEDPEVKFNWYVDGVEVHNAKTKPREEQYNSTYRVVSVLTVLHQDWLNGKEYKCKVSNKALGAPIEKTISKAKGQPREPQVYTLPPSREEMTKNQVSLTCLVKGFYPSDIAVEWESNGQPENNYKTTPPVLDSDGSFFLYSKLTVDKSRWQQGNVFSCSVMHEALHNHYTQKSLSLSPGK

SEQ ID NO: 334 - protein, 330 aa, Artificial Sequence
  Description of Artificial Sequence: Synthetic polypeptide
ASTKGPSVFPLAPSSKSTSGGTAALGCLVKDYFPEPVTVSWNSGALTSGVHTFPAVLQSSGLYSLSSVVTVPSSSLGTQTYICNVNHKPSNTKVDKKVEPKSCDKTHTCPPCPAPEAAGGPSVFLFPPKPKDTLMISRTPEVTCVVVDVSHEDPEVKFNWYVDGVEVHNAKTKPREEQYNSTYRVVSVLTVLHQDWLNGKEYKCKVSNKALGAPIEKTISKAKGQPREPQVYTLPPSREEMTKNQVSLTCLVKGFYPSDIAVEWESNGQPENNYKTTPPVLDSDGSFFLYSKLTVDKSRWQQGNVFSCSVMHEALHNHYTQKSLSLSPGK

SEQ ID NO: 335 - protein, 330 aa, Artificial Sequence
  Description of Artificial Sequence: Synthetic polypeptide
ASTKGPSVFPLAPSSKSTSGGTAALGCLVKDYFPEPVTVSWNSGALTSGVHTFPAVLQSSGLYSLSSVVTVPSSSLGTQTYICNVNHKPSNTKVDKKVEPKSCDKTHTCPPCPAPEFEGGPSVFLFPPKPKDTLMISRTPEVTCVVVDVSHEDPEVKFNWYVDGVEVHNAKTKPREEQYNSTYRVVSVLTVLHQDWLNGKEYKCKVSNKALPASIEKTISKAKGQPREPQVYTLPPSRDELTKNQVSLTCLVKGFYPSDIAVEWESNGQPENNYKTTPPVLDSDGSFFLYSKLTVDKSRWQQGNVFSCSVMHEALHNHYTQKSLSLSPGK

SEQ ID NO: 336 - protein, 330 aa, Artificial Sequence
  Description of Artificial Sequence: Synthetic polypeptide
ASTKGPSVFPLAPSSKSTSGGTAALGCLVKDYFPEPVTVSWNSGALTSGVHTFPAVLQSSGLYSLSSVVTVPSSSLGTQTYICNVNHKPSNTKVDKRVEPKSCDKTHTCPPCPAPEFEGGPSVFLFPPKPKDTLMISRTPEVTCVVVDVSHEDPEVKFNWYVDGVEVHNAKTKPREEQYNSTYRVVSVLTVLHQDWLNGKEYKCKVSNKALPASIEKTISKAKGQPREPQVYTLPPSREEMTKNQVSLTCLVKGFYPSDIAVEWESNGQPENNYKTTPPVLDSDGSFFLYSKLTVDKSRWQQGNVFSCSVMHEALHNHYTQKSLSLSPGK

SEQ ID NO: 337 - protein, 330 aa, Artificial Sequence
  Description of Artificial Sequence: Synthetic polypeptide
ASTKGPSVFPLAPSSKSTSGGTAALGCLVKDYFPEPVTVSWNSGALTSGVHTFPAVLQSSGLYSLSSVVTVPSSSLGTQTYICNVNHKPSNTKVDKKVEPKSCDKTHTCPPCPAPEFEGGPSVFLFPPKPKDTLMISRTPEVTCVVVDVSHEDPEVKFNWYVDGVEVHNAKTKPREEQYNSTYRVVSVLTVLHQDWLNGKEYKCKVSNKALPASIEKTISKAKGQPREPQVYTLPPSREEMTKNQVSLTCLVKGFYPSDIAVEWESNGQPENNYKTTPPVLDSDGSFFLYSKLTVDKSRWQQGNVFSCSVMHEALHNHYTQKSLSLSPGK

SEQ ID NO: 338 - protein, 329 aa, Artificial Sequence
  Description of Artificial Sequence: Synthetic polypeptide
ASTKGPSVFPLAPSSKSTSGGTAALGCLVKDYFPEPVTVSWNSGALTSGVHTFPAVLQSSGLYSLSSVVTVPSSSLGTQTYICNVNHKPSNTKVDKKVEPKSCDKTHTCPPCPAPEAEGAPSVFLFPPKPKDTLMISRTPEVTCVVVDVSHEDPEVKFNWYVDGVEVHNAKTKPREEQYNSTYRVVSVLTVLHQDWLNGKEYKCKVSNKALPAPIEKTISKAKGQPREPQVYTLPPSRDELTKNQVSLTCLVKGFYPSDIAVEWESNGQPENNYKTTPPVLDSDGSFFLYSKLTVDKSRWQQGNVFSCSVMHEALHNHYTQKSLSLSPG

SEQ ID NO: 339 - protein, 329 aa, Artificial Sequence
  Description of Artificial Sequence: Synthetic polypeptide
ASTKGPSVFPLAPSSKSTSGGTAALGCLVKDYFPEPVTVSWNSGALTSGVHTFPAVLQSSGLYSLSSVVTVPSSSLGTQTYICNVNHKPSNTKVDKRVEPKSCDKTHTCPPCPAPEAEGAPSVFLFPPKPKDTLMISRTPEVTCVVVDVSHEDPEVKFNWYVDGVEVHNAKTKPREEQYNSTYRVVSVLTVLHQDWLNGKEYKCKVSNKALPAPIEKTISKAKGQPREPQVYTLPPSREEMTKNQVSLTCLVKGFYPSDIAVEWESNGQPENNYKTTPPVLDSDGSFFLYSKLTVDKSRWQQGNVFSCSVMHEALHNHYTQKSLSLSPG

SEQ ID NO: 340 - protein, 329 aa, Artificial Sequence
  Description of Artificial Sequence: Synthetic polypeptide
ASTKGPSVFPLAPSSKSTSGGTAALGCLVKDYFPEPVTVSWNSGALTSGVHTFPAVLQSSGLYSLSSVVTVPSSSLGTQTYICNVNHKPSNTKVDKKVEPKSCDKTHTCPPCPAPEAEGAPSVFLFPPKPKDTLMISRTPEVTCVVVDVSHEDPEVKFNWYVDGVEVHNAKTKPREEQYNSTYRVVSVLTVLHQDWLNGKEYKCKVSNKALPAPIEKTISKAKGQPREPQVYTLPPSREEMTKNQVSLTCLVKGFYPSDIAVEWESNGQPENNYKTTPPVLDSDGSFFLYSKLTVDKSRWQQGNVFSCSVMHEALHNHYTQKSLSLSPG

SEQ ID NO: 341 - protein, 329 aa, Artificial Sequence
  Description of Artificial Sequence: Synthetic polypeptide
ASTKGPSVFPLAPSSKSTSGGTAALGCLVKDYFPEPVTVSWNSGALTSGVHTFPAVLQSSGLYSLSSVVTVPSSSLGTQTYICNVNHKPSNTKVDKKVEPKSCDKTHTCPPCPAPEAEGAPSVFLFPPKPKDTLMISRTPEVTCVVVDVSHEDPEVKFNWYVDGVEVHNAKTKPREEQYNSTYRVVSVLTVLHQDWLNGKEYKCKVSNKALPASIEKTISKAKGQPREPQVYTLPPSRDELTKNQVSLTCLVKGFYPSDIAVEWESNGQPENNYKTTPPVLDSDGSFFLYSKLTVDKSRWQQGNVFSCSVMHEALHNHYTQKSLSLSPG

SEQ ID NO: 342 - protein, 329 aa, Artificial Sequence
  Description of Artificial Sequence: Synthetic polypeptide
ASTKGPSVFPLAPSSKSTSGGTAALGCLVKDYFPEPVTVSWNSGALTSGVHTFPAVLQSSGLYSLSSVVTVPSSSLGTQTYICNVNHKPSNTKVDKRVEPKSCDKTHTCPPCPAPEAEGAPSVFLFPPKPKDTLMISRTPEVTCVVVDVSHEDPEVKFNWYVDGVEVHNAKTKPREEQYNSTYRVVSVLTVLHQDWLNGKEYKCKVSNKALPASIEKTISKAKGQPREPQVYTLPPSREEMTKNQVSLTCLVKGFYPSDIAVEWESNGQPENNYKTTPPVLDSDGSFFLYSKLTVDKSRWQQGNVFSCSVMHEALHNHYTQKSLSLSPG

SEQ ID NO: 343 - protein, 329 aa, Artificial Sequence
  Description of Artificial Sequence: Synthetic polypeptide
ASTKGPSVFPLAPSSKSTSGGTAALGCLVKDYFPEPVTVSWNSGALTSGVHTFPAVLQSSGLYSLSSVVTVPSSSLGTQTYICNVNHKPSNTKVDKKVEPKSCDKTHTCPPCPAPEAEGAPSVFLFPPKPKDTLMISRTPEVTCVVVDVSHEDPEVKFNWYVDGVEVHNAKTKPREEQYNSTYRVVSVLTVLHQDWLNGKEYKCKVSNKALPASIEKTISKAKGQPREPQVYTLPPSREEMTKNQVSLTCLVKGFYPSDIAVEWESNGQPENNYKTTPPVLDSDGSFFLYSKLTVDKSRWQQGNVFSCSVMHEALHNHYTQKSLSLSPG

SEQ ID NO: 344 - protein, 330 aa, Artificial Sequence
  Description of Artificial Sequence: Synthetic polypeptide
ASTKGPSVFPLAPSSKSTSGGTAALGCLVKDYFPEPVTVSWNSGALTSGVHTFPAVLQSSGLYSLSSVVTVPSSSLGTQTYICNVNHKPSNTKVDKKVEPKSCDKTHTCPPCPAPEAAGGPSVFLFPPKPKDTLMISRTPEVTCVVVDVSHEDPEVKFNWYVDGVEVHNAKTKPREEQYNSTYRVVSVLTVLHQDWLNGKEYKCKVSNKALAAPIEKTISKAKGQPREPQVYTLPPSRDELTKNQVSLTCLVKGFYPSDIAVEWESNGQPENNYKTTPPVLDSDGSFFLYSKLTVDKSRWQQGNVFSCSVMHEALHNHYTQKSLSLSPGK

SEQ ID NO: 345 - protein, 330 aa, Artificial Sequence
  Description of Artificial Sequence: Synthetic polypeptide
ASTKGPSVFPLAPSSKSTSGGTAALGCLVKDYFPEPVTVSWNSGALTSGVHTFPAVLQSSGLYSLSSVVTVPSSSLGTQTYICNVNHKPSNTKVDKRVEPKSCDKTHTCPPCPAPEAAGGPSVFLFPPKPKDTLMISRTPEVTCVVVDVSHEDPEVKFNWYVDGVEVHNAKTKPREEQYNSTYRVVSVLTVLHQDWLNGKEYKCKVSNKALAAPIEKTISKAKGQPREPQVYTLPPSREEMTKNQVSLTCLVKGFYPSDIAVEWESNGQPENNYKTTPPVLDSDGSFFLYSKLTVDKSRWQQGNVFSCSVMHEALHNHYTQKSLSLSPGK

SEQ ID NO: 346 - protein, 330 aa, Artificial Sequence
  Description of Artificial Sequence: Synthetic polypeptide
ASTKGPSVFPLAPSSKSTSGGTAALGCLVKDYFPEPVTVSWNSGALTSGVHTFPAVLQSSGLYSLSSVVTVPSSSLGTQTYICNVNHKPSNTKVDKKVEPKSCDKTHTCPPCPAPEAAGGPSVFLFPPKPKDTLMISRTPEVTCVVVDVSHEDPEVKFNWYVDGVEVHNAKTKPREEQYNSTYRVVSVLTVLHQDWLNGKEYKCKVSNKALAAPIEKTISKAKGQPREPQVYTLPPSREEMTKNQVSLTCLVKGFYPSDIAVEWESNGQPENNYKTTPPVLDSDGSFFLYSKLTVDKSRWQQGNVFSCSVMHEALHNHYTQKSLSLSPGK

SEQ ID NO: 347 - protein, 330 aa, Artificial Sequence
  Description of Artificial Sequence: Synthetic polypeptide
ASTKGPSVFPLAPSSKSTSGGTAALGCLVKDYFPEPVTVSWNSGALTSGVHTFPAVLQSSGLYSLSSVVTVPSSSLGTQTYICNVNHKPSNTKVDKKVEPKSCDKTHTCPPCPAPELLGGPSVFLFPPKPKDTLMISRTPEVTCVVVAVSHEDPEVKFNWYVDGVEVHNAKTKPREEQYNSTYRVVSVLTVLHQDWLNGKEYKCKVSNKALPAPIEKTISKAKGQPREPQVYTLPPSRDELTKNQVSLTCLVKGFYPSDIAVEWESNGQPENNYKTTPPVLDSDGSFFLYSKLTVDKSRWQQGNVFSCSVMHEALHNHYTQKSLSLSPGK

SEQ ID NO: 348 - protein, 330 aa, Artificial Sequence
  Description of Artificial Sequence: Synthetic polypeptide
ASTKGPSVFPLAPSSKSTSGGTAALGCLVKDYFPEPVTVSWNSGALTSGVHTFPAVLQSSGLYSLSSVVTVPSSSLGTQTYICNVNHKPSNTKVDKRVEPKSCDKTHTCPPCPAPELLGGPSVFLFPPKPKDTLMISRTPEVTCVVVAVSHEDPEVKFNWYVDGVEVHNAKTKPREEQYNSTYRVVSVLTVLHQDWLNGKEYKCKVSNKALPAPIEKTISKAKGQPREPQVYTLPPSREEMTKNQVSLTCLVKGFYPSDIAVEWESNGQPENNYKTTPPVLDSDGSFFLYSKLTVDKSRWQQGNVFSCSVMHEALHNHYTQKSLSLSPGK

SEQ ID NO: 349 - protein, 330 aa, Artificial Sequence
  Description of Artificial Sequence: Synthetic polypeptide
ASTKGPSVFPLAPSSKSTSGGTAALGCLVKDYFPEPVTVSWNSGALTSGVHTFPAVLQSSGLYSLSSVVTVPSSSLGTQTYICNVNHKPSNTKVDKKVEPKSCDKTHTCPPCPAPELLGGPSVFLFPPKPKDTLMISRTPEVTCVVVAVSHEDPEVKFNWYVDGVEVHNAKTKPREEQYNSTYRVVSVLTVLHQDWLNGKEYKCKVSNKALPAPIEKTISKAKGQPREPQVYTLPPSREEMTKNQVSLTCLVKGFYPSDIAVEWESNGQPENNYKTTPPVLDSDGSFFLYSKLTVDKSRWQQGNVFSCSVMHEALHNHYTQKSLSLSPGK

SEQ ID NO: 350 - protein, 330 aa, Artificial Sequence
  Description of Artificial Sequence: Synthetic polypeptide
ASTKGPSVFPLAPSSKSTSGGTAALGCLVKDYFPEPVTVSWNSGALTSGVHTFPAVLQSSGLYSLSSVVTVPSSSLGTQTYICNVNHKPSNTKVDKKVEPKSCDKTHTCPPCPAPELLGGPSVFLFPPKPKDTLMISRTPEVTCVVVDVSHEDPEVKFNWYVDGVEVHNAKTKPREEQYGSTYRVVSVLTVLHQDWLNGKEYKCKVSNKALPAPIEKTISKAKGQPREPQVYTLPPSRDELTKNQVSLTCLVKGFYPSDIAVEWESNGQPENNYKTTPPVLDSDGSFFLYSKLTVDKSRWQQGNVFSCSVMHEALHNHYTQKSLSLSPGK

SEQ ID NO: 351 - protein, 330 aa, Artificial Sequence
  Description of Artificial Sequence: Synthetic polypeptide
ASTKGPSVFPLAPSSKSTSGGTAALGCLVKDYFPEPVTVSWNSGALTSGVHTFPAVLQSSGLYSLSSVVTVPSSSLGTQTYICNVNHKPSNTKVDKRVEPKSCDKTHTCPPCPAPELLGGPSVFLFPPKPKDTLMISRTPEVTCVVVDVSHEDPEVKFNWYVDGVEVHNAKTKPREEQYGSTYRVVSVLTVLHQDWLNGKEYKCKVSNKALPAPIEKTISKAKGQPREPQVYTLPPSREEMTKNQVSLTCLVKGFYPSDIAVEWESNGQPENNYKTTPPVLDSDGSFFLYSKLTVDKSRWQQGNVFSCSVMHEALHNHYTQKSLSLSPGK

SEQ ID NO: 352 - protein, 330 aa, Artificial Sequence
  Description of Artificial Sequence: Synthetic polypeptide
ASTKGPSVFPLAPSSKSTSGGTAALGCLVKDYFPEPVTVSWNSGALTSGVHTFPAVLQSSGLYSLSSVVTVPSSSLGTQTYICNVNHKPSNTKVDKKVEPKSCDKTHTCPPCPAPELLGGPSVFLFPPKPKDTLMISRTPEVTCVVVDVSHEDPEVKFNWYVDGVEVHNAKTKPREEQYGSTYRVVSVLTVLHQDWLNGKEYKCKVSNKALPAPIEKTISKAKGQPREPQVYTLPPSREEMTKNQVSLTCLVKGFYPSDIAVEWESNGQPENNYKTTPPVLDSDGSFFLYSKLTVDKSRWQQGNVFSCSVMHEALHNHYTQKSLSLSPGK

SEQ ID NO: 353 - protein, 330 aa, Artificial Sequence
  Description of Artificial Sequence: Synthetic polypeptide
ASTKGPSVFPLAPSSKSTSGGTAALGCLVKDYFPEPVTVSWNSGALTSGVHTFPAVLQSSGLYSLSSVVTVPSSSLGTQTYICNVNHKPSNTKVDKKVEPKSCDKTHTCPPCPAPELLGGPSVFLFPPKPKDTLMISRTPEVTCVVVAVSHEDPEVKFNWYVDGVEVHNAKTKPREEQYASTYRVVSVLTVLHQDWLNGKEYKCKVSNKALPAPIEKTISKAKGQPREPQVYTLPPSRDELTKNQVSLTCLVKGFYPSDIAVEWESNGQPENNYKTTPPVLDSDGSFFLYSKLTVDKSRWQQGNVFSCSVMHEALHNHYTQKSLSLSPGK

SEQ ID NO: 354 - protein, 330 aa, Artificial Sequence
  Description of Artificial Sequence: Synthetic polypeptide
ASTKGPSVFPLAPSSKSTSGGTAALGCLVKDYFPEPVTVSWNSGALTSGVHTFPAVLQSSGLYSLSSVVTVPSSSLGTQTYICNVNHKPSNTKVDKRVEPKSCDKTHTCPPCPAPELLGGPSVFLFPPKPKDTLMISRTPEVTCVVVAVSHEDPEVKFNWYVDGVEVHNAKTKPREEQYASTYRVVSVLTVLHQDWLNGKEYKCKVSNKALPAPIEKTISKAKGQPREPQVYTLPPSREEMTKNQVSLTCLVKGFYPSDIAVEWESNGQPENNYKTTPPVLDSDGSFFLYSKLTVDKSRWQQGNVFSCSVMHEALHNHYTQKSLSLSPGK

SEQ ID NO: 355 - protein, 330 aa, Artificial Sequence
  Description of Artificial Sequence: Synthetic polypeptide
ASTKGPSVFPLAPSSKSTSGGTAALGCLVKDYFPEPVTVSWNSGALTSGVHTFPAVLQSSGLYSLSSVVTVPSSSLGTQTYICNVNHKPSNTKVDKKVEPKSCDKTHTCPPCPAPELLGGPSVFLFPPKPKDTLMISRTPEVTCVVVAVSHEDPEVKFNWYVDGVEVHNAKTKPREEQYASTYRVVSVLTVLHQDWLNGKEYKCKVSNKALPAPIEKTISKAKGQPREPQVYTLPPSREEMTKNQVSLTCLVKGFYPSDIAVEWESNGQPENNYKTTPPVLDSDGSFFLYSKLTVDKSRWQQGNVFSCSVMHEALHNHYTQKSLSLSPGK

SEQ ID NO: 356 - protein, 330 aa, Artificial Sequence
  Description of Artificial Sequence: Synthetic polypeptide
ASTKGPSVFPLAPSSKSTSGGTAALGCLVKDYFPEPVTVSWNSGALTSGVHTFPAVLQSSGLYSLSSVVTVPSSSLGTQTYICNVNHKPSNTKVDKKVEPKSCDKTHTCPPCPAPELLGGPSVFLFPPKPKDTLMISRTPEVTCVVVAVSHEDPEVKFNWYVDGVEVHNAKTKPREEQYGSTYRVVSVLTVLHQDWLNGKEYKCKVSNKALPAPIEKTISKAKGQPREPQVYTLPPSRDELTKNQVSLTCLVKGFYPSDIAVEWESNGQPENNYKTTPPVLDSDGSFFLYSKLTVDKSRWQQGNVFSCSVMHEALHNHYTQKSLSLSPGK

SEQ ID NO: 357 - protein, 330 aa, Artificial Sequence
  Description of Artificial Sequence: Synthetic polypeptide
ASTKGPSVFPLAPSSKSTSGGTAALGCLVKDYFPEPVTVSWNSGALTSGVHTFPAVLQSSGLYSLSSVVTVPSSSLGTQTYICNVNHKPSNTKVDKRVEPKSCDKTHTCPPCPAPELLGGPSVFLFPPKPKDTLMISRTPEVTCVVVAVSHEDPEVKFNWYVDGVEVHNAKTKPREEQYGSTYRVVSVLTVLHQDWLNGKEYKCKVSNKALPAPIEKTISKAKGQPREPQVYTLPPSREEMTKNQVSLTCLVKGFYPSDIAVEWESNGQPENNYKTTPPVLDSDGSFFLYSKLTVDKSRWQQGNVFSCSVMHEALHNHYTQKSLSLSPGK

SEQ ID NO: 358 - protein, 330 aa, Artificial Sequence
  Description of Artificial Sequence: Synthetic polypeptide
ASTKGPSVFPLAPSSKSTSGGTAALGCLVKDYFPEPVTVSWNSGALTSGVHTFPAVLQSSGLYSLSSVVTVPSSSLGTQTYICNVNHKPSNTKVDKKVEPKSCDKTHTCPPCPAPELLGGPSVFLFPPKPKDTLMISRTPEVTCVVVAVSHEDPEVKFNWYVDGVEVHNAKTKPREEQYGSTYRVVSVLTVLHQDWLNGKEYKCKVSNKALPAPIEKTISKAKGQPREPQVYTLPPSREEMTKNQVSLTCLVKGFYPSDIAVEWESNGQPENNYKTTPPVLDSDGSFFLYSKLTVDKSRWQQGNVFSCSVMHEALHNHYTQKSLSLSPGK

SEQ ID NO: 359 - protein, 330 aa, Artificial Sequence
  Description of Artificial Sequence: Synthetic polypeptide
ASTKGPSVFPLAPSSKSTSGGTAALGCLVKDYFPEPVTVSWNSGALTSGVHTFPAVLQSSGLYSLSSVVTVPSSSLGTQTYICNVNHKPSNTKVDKKVEPKSCDKTHTCPPCPAPELAGAPSVFLFPPKPKDTLMISRTPEVTCVVVDVSHEDPEVKFNWYVDGVEVHNAKTKPREEQYNSTYRVVSVLTVLHQDWLNGKEYKCKVSNKALPAPIEKTISKAKGQPREPQVYTLPPSRDELTKNQVSLTCLVKGFYPSDIAVEWESNGQPENNYKTTPPVLDSDGSFFLYSKLTVDKSRWQQGNVFSCSVMHEALHNHYTQKSLSLSPGK

SEQ ID NO: 360 - protein, 330 aa, Artificial Sequence
  Description of Artificial Sequence: Synthetic polypeptide
ASTKGPSVFPLAPSSKSTSGGTAALGCLVKDYFPEPVTVSWNSGALTSGVHTFPAVLQSSGLYSLSSVVTVPSSSLGTQTYICNVNHKPSNTKVDKRVEPKSCDKTHTCPPCPAPELAGAPSVFLFPPKPKDTLMISRTPEVTCVVVDVSHEDPEVKFNWYVDGVEVHNAKTKPREEQYNSTYRVVSVLTVLHQDWLNGKEYKCKVSNKALPAPIEKTISKAKGQPREPQVYTLPPSREEMTKNQVSLTCLVKGFYPSDIAVEWESNGQPENNYKTTPPVLDSDGSFFLYSKLTVDKSRWQQGNVFSCSVMHEALHNHYTQKSLSLSPGK

SEQ ID NO: 361 - protein, 330 aa, Artificial Sequence
  Description of Artificial Sequence: Synthetic polypeptide
ASTKGPSVFPLAPSSKSTSGGTAALGCLVKDYFPEPVTVSWNSGALTSGVHTFPAVLQSSGLYSLSSVVTVPSSSLGTQTYICNVNHKPSNTKVDKKVEPKSCDKTHTCPPCPAPELAGAPSVFLFPPKPKDTLMISRTPEVTCVVVDVSHEDPEVKFNWYVDGVEVHNAKTKPREEQYNSTYRVVSVLTVLHQDWLNGKEYKCKVSNKALPAPIEKTISKAKGQPREPQVYTLPPSREEMTKNQVSLTCLVKGFYPSDIAVEWESNGQPENNYKTTPPVLDSDGSFFLYSKLTVDKSRWQQGNVFSCSVMHEALHNHYTQKSLSLSPGK

SEQ ID NO: 362 - protein, 327 aa, Unknown
  Description of Unknown: IgG4 constant region sequence
ASTKGPSVFPLAPCSRSTSESTAALGCLVKDYFPEPVTVSWNSGALTSGVHTFPAVLQSSGLYSLSSVVTVPSSSLGTKTYTCNVDHKPSNTKVDKRVESKYGPPCPSCPAPEFLGGPSVFLFPPKPKDTLMISRTPEVTCVVVDVSQEDPEVQFNWYVDGVEVHNAKTKPREEQFNSTYRVVSVLTVLHQDWLNGKEYKCKVSNKGLPSSIEKTISKAKGQPREPQVYTLPPSQEEMTKNQVSLTCLVKGFYPSDIAVEWESNGQPENNYKTTPPVLDSDGSFFLYSRLTVDKSRWQEGNVFSCSVMHEALHNHYTQKSLSLSLGK

SEQ ID NO: 363-400 - skipped (38 entries)

SEQ ID NO: 401 - protein, 330 aa, Artificial Sequence; identical to SEQ ID NO: 326
  Description of Artificial Sequence: Synthetic polypeptide

SEQ ID NO: 402 - protein, 330 aa, Artificial Sequence; identical to SEQ ID NO: 323
  Description of Artificial Sequence: Synthetic polypeptide

SEQ ID NO: 403 - protein, 330 aa, Artificial Sequence
  Description of Artificial Sequence: Synthetic polypeptide
ASTKGPSVFPLAPSSKSTSGGTAALGCLVKDYFPEPVTVSWNSGALTSGVHTFPAVLQSSGLYSLSSVVTVPSSSLGTQTYICNVNHKPSNTKVDKKVEPKSCDKTHTCPPCPAPEAAGAPSVFLFPPKPKDTLMISRTPEVTCVVVDVSHEDPEVKFNWYVDGVEVHNAKTKPREEQYNSTYRVVSVLTVLHQDWLNGKEYKCKVSNKALPAPIEKTISKAKGQPREPQVYTLPPSRDELTKNQVSLTCLVKGFYPSDIAVEWESNGQPENNYKTTPPVLDSDGSFFLYSKLTVDKSRWQQGNVFSCSVMHEALHNHYTQKSLSLSPGK

SEQ ID NO: 404 - protein, 330 aa, Artificial Sequence
  Description of Artificial Sequence: Synthetic polypeptide
ASTKGPSVFPLAPSSKSTSGGTAALGCLVKDYFPEPVTVSWNSGALTSGVHTFPAVLQSSGLYSLSSVVTVPSSSLGTQTYICNVNHKPSNTKVDKKVEPKSCDKTHTCPPCPAPEAEGAPSVFLFPPKPKDTLMISRTPEVTCVVVDVSHEDPEVKFNWYVDGVEVHNAKTKPREEQYNSTYRVVSVLTVLHQDWLNGKEYKCKVSNKALPAPIEKTISKAKGQPREPQVYTLPPSRDELTKNQVSLTCLVKGFYPSDIAVEWESNGQPENNYKTTPPVLDSDGSFFLYSKLTVDKSRWQQGNVFSCSVMHEALHNHYTQKSLSLSPGK

SEQ ID NO: 405 - protein, 330 aa, Artificial Sequence; identical to SEQ ID NO: 344
  Description of Artificial Sequence: Synthetic polypeptide

SEQ ID NO: 406 - protein, 330 aa, Artificial Sequence; identical to SEQ ID NO: 344
  Description of Artificial Sequence: Synthetic polypeptide

SEQ ID NO: 407 - protein, 330 aa, Artificial Sequence; identical to SEQ ID NO: 344
  Description of Artificial Sequence: Synthetic polypeptide

SEQ ID NO: 408 - protein, 330 aa, Artificial Sequence
  Description of Artificial Sequence: Synthetic polypeptide
ASTKGPSVFPLAPSSKSTSGGTAALGCLVKDYFPEPVTVSWNSGALTSGVHTFPAVLQSSGLYSLSSVVTVPSSSLGTQTYICNVNHKPSNTKVDKKVEPKSCDKTHTCPPCPAPEEFGGPSVFLFPPKPKDTLMISRTPEVTCVVVDVSHEDPEVKFNWYVDGVEVHNAKTKPREEQYNSTYRVVSVLTVLHQDWLNGKEYKCKVSNKALPASIEKTISKAKGQPREPQVYTLPPSRDELTKNQVSLTCLVKGFYPSDIAVEWESNGQPENNYKTTPPVLDSDGSFFLYSKLTVDKSRWQQGNVFSCSVMHEALHNHYTQKSLSLSPGK

SEQ ID NO: 409 - protein, 330 aa, Artificial Sequence; identical to SEQ ID NO: 356
  Description of Artificial Sequence: Synthetic polypeptide

SEQ ID NO: 410 - protein, 330 aa, Artificial Sequence; identical to SEQ ID NO: 350
  Description of Artificial Sequence: Synthetic polypeptide

SEQ ID NO: 411 - protein, 327 aa, Artificial Sequence
  Description of Artificial Sequence: Synthetic polypeptide
ASTKGPSVFPLAPCSRSTSESTAALGCLVKDYFPEPVTVSWNSGALTSGVHTFPAVLQSSGLYSLSSVVTVPSSSLGTKTYTCNVDHKPSNTKVDKRVESKYGPPCPPCPAPEFLGGPSVFLFPPKPKDTLMISRTPEVTCVVVDVSQEDPEVQFNWYVDGVEVHNAKTKPREEQFNSTYRVVSVLTVLHQDWLNGKEYKCKVSNKGLPSSIEKTISKAKGQPREPQVYTLPPSQEEMTKNQVSLTCLVKGFYPSDIAVEWESNGQPENNYKTTPPVLDSDGSFFLYSRLTVDKSRWQEGNVFSCSVMHEALHNHYTQKSLSLSLGK

SEQ ID NO: 412 - protein, 327 aa, Artificial Sequence
  Description of Artificial Sequence: Synthetic polypeptide
ASTKGPSVFPLAPCSRSTSESTAALGCLVKDYFPEPVTVSWNSGALTSGVHTFPAVLQSSGLYSLSSVVTVPSSSLGTKTYTCNVDHKPSNTKVDKRVESKYGPPCPPCPAPEFEGGPSVFLFPPKPKDTLMISRTPEVTCVVVDVSQEDPEVQFNWYVDGVEVHNAKTKPREEQFNSTYRVVSVLTVLHQDWLNGKEYKCKVSNKGLPSSIEKTISKAKGQPREPQVYTLPPSQEEMTKNQVSLTCLVKGFYPSDIAVEWESNGQPENNYKTTPPVLDSDGSFFLYSRLTVDKSRWQEGNVFSCSVMHEALHNHYTQKSLSLSLGK

SEQ ID NO: 413 - protein, 327 aa, Artificial Sequence
  Description of Artificial Sequence: Synthetic polypeptide
ASTKGPSVFPLAPCSRSTSESTAALGCLVKDYFPEPVTVSWNSGALTSGVHTFPAVLQSSGLYSLSSVVTVPSSSLGTKTYTCNVDHKPSNTKVDKRVESKYGPPCPPCPAPEAAGGPSVFLFPPKPKDTLMISRTPEVTCVVVDVSQEDPEVQFNWYVDGVEVHNAKTKPREEQFNSTYRVVSVLTVLHQDWLNGKEYKCKVSNKGLPSSIEKTISKAKGQPREPQVYTLPPSQEEMTKNQVSLTCLVKGFYPSDIAVEWESNGQPENNYKTTPPVLDSDGSFFLYSRLTVDKSRWQEGNVFSCSVMHEALHNHYTQKSLSLSLGK

SEQ ID NO: 414-500 - skipped (87 entries)

SEQ ID NO: 501 - protein, 446 aa, Artificial Sequence
  Description of Artificial Sequence: Synthetic polypeptide
QVQLVQSGAEVKKPGASVKVSCKASGFDIQDTYMHWVKQRPGQGLEWMGRIDPASGHTKYDPKFQVRVTITRDTSTSTVYLELSSLRSEDTAVYYCARSGGLPDVWGQGTTVTVSSASTKGPSVFPLAPSSKSTSGGTAALGCLVKDYFPEPVTVSWNSGALTSGVHTFPAVLQSSGLYSLSSVVTVPSSSLGTQTYICNVNHKPSNTKVDKKVEPKSCDKTHTCPPCPAPEAAGGPSVFLFPPKPKDTLMISRTPEVTCVVVDVSHEDPEVKFNWYVDGVEVHNAKTKPREEQYNSTYRVVSVLTVLHQDWLNGKEYKCKVSNKALPAPIEKTISKAKGQPREPQVYTLPPSRDELTKNQVSLTCLVKGFYPSDIAVEWESNGQPENNYKTTPPVLDSDGSFFLYSKLTVDKSRWQQGNVFSCSVMHEALHNHYTQKSLSLSPGK

SEQ ID NO: 502 - protein, 446 aa, Artificial Sequence
  Description of Artificial Sequence: Synthetic polypeptide
QVQLVQSGAEVKKPGASVKVSCKASGFDIQDTYMHWVKQRPGQGLEWMGRIDPASGHTKYDPKFQVRVTITRDTSTSTVYLELSSLRSEDTAVYYCARSGGLPDVWGQGTTVTVSSASTKGPSVFPLAPSSKSTSGGTAALGCLVKDYFPEPVTVSWNSGALTSGVHTFPAVLQSSGLYSLSSVVTVPSSSLGTQTYICNVNHKPSNTKVDKKVEPKSCDKTHTCPPCPAPELEGGPSVFLFPPKPKDTLMISRTPEVTCVVVDVSHEDPEVKFNWYVDGVEVHNAKTKPREEQYNSTYRVVSVLTVLHQDWLNGKEYKCKVSNKALPAPIEKTISKAKGQPREPQVYTLPPSRDELTKNQVSLTCLVKGFYPSDIAVEWESNGQPENNYKTTPPVLDSDGSFFLYSKLTVDKSRWQQGNVFSCSVMHEALHNHYTQKSLSLSPGK

SEQ ID NO: 503 - protein, 446 aa, Artificial Sequence
  Description of Artificial Sequence: Synthetic polypeptide
QVQLVQSGAEVKKPGASVKVSCKASGFDIQDTYMHWVKQRPGQGLEWMGRIDPASGHTKYDPKFQVRVTITRDTSTSTVYLELSSLRSEDTAVYYCARSGGLPDVWGQGTTVTVSSASTKGPSVFPLAPSSKSTSGGTAALGCLVKDYFPEPVTVSWNSGALTSGVHTFPAVLQSSGLYSLSSVVTVPSSSLGTQTYICNVNHKPSNTKVDKKVEPKSCDKTHTCPPCPAPEAAGAPSVFLFPPKPKDTLMISRTPEVTCVVVDVSHEDPEVKFNWYVDGVEVHNAKTKPREEQYNSTYRVVSVLTVLHQDWLNGKEYKCKVSNKALPAPIEKTISKAKGQPREPQVYTLPPSRDELTKNQVSLTCLVKGFYPSDIAVEWESNGQPENNYKTTPPVLDSDGSFFLYSKLTVDKSRWQQGNVFSCSVMHEALHNHYTQKSLSLSPGK

SEQ ID NO: 504 - protein, 446 aa, Artificial Sequence
  Description of Artificial Sequence: Synthetic polypeptide
QVQLVQSGAEVKKPGASVKVSCKASGFDIQDTYMHWVKQRPGQGLEWMGRIDPASGHTKYDPKFQVRVTITRDTSTSTVYLELSSLRSEDTAVYYCARSGGLPDVWGQGTTVTVSSASTKGPSVFPLAPSSKSTSGGTAALGCLVKDYFPEPVTVSWNSGALTSGVHTFPAVLQSSGLYSLSSVVTVPSSSLGTQTYICNVNHKPSNTKVDKKVEPKSCDKTHTCPPCPAPEAEGAPSVFLFPPKPKDTLMISRTPEVTCVVVDVSHEDPEVKFNWYVDGVEVHNAKTKPREEQYNSTYRVVSVLTVLHQDWLNGKEYKCKVSNKALPAPIEKTISKAKGQPREPQVYTLPPSRDELTKNQVSLTCLVKGFYPSDIAVEWESNGQPENNYKTTPPVLDSDGSFFLYSKLTVDKSRWQQGNVFSCSVMHEALHNHYTQKSLSLSPGK

SEQ ID NO: 505 - protein, 446 aa, Artificial Sequence
  Description of Artificial Sequence: Synthetic polypeptide
QVQLVQSGAEVKKPGASVKVSCKASGFDIQDTYMHWVKQRPGQGLEWMGRIDPASGHTKYDPKFQVRVTITRDTSTSTVYLELSSLRSEDTAVYYCARSGGLPDVWGQGTTVTVSSASTKGPSVFPLAPSSKSTSGGTAALGCLVKDYFPEPVTVSWNSGALTSGVHTFPAVLQSSGLYSLSSVVTVPSSSLGTQTYICNVNHKPSNTKVDKKVEPKSCDKTHTCPPCPAPEAAGGPSVFLFPPKPKDTLMISRTPEVTCVVVDVSHEDPEVKFNWYVDGVEVHNAKTKPREEQYNSTYRVVSVLTVLHQDWLNGKEYKCKVSNKALAAPIEKTISKAKGQPREPQVYTLPPSRDELTKNQVSLTCLVKGFYPSDIAVEWESNGQPENNYKTTPPVLDSDGSFFLYSKLTVDKSRWQQGNVFSCSVMHEALHNHYTQKSLSLSPGK

SEQ ID NO: 506 - protein, 446 aa, Artificial Sequence; identical to SEQ ID NO: 505
  Description of Artificial Sequence: Synthetic polypeptide

SEQ ID NO: 507 - protein, 446 aa, Artificial Sequence; identical to SEQ ID NO: 505
  Description of Artificial Sequence: Synthetic polypeptide

SEQ ID NO: 508 - protein, 446 aa, Artificial Sequence
  Description of Artificial Sequence: Synthetic polypeptide
QVQLVQSGAEVKKPGASVKVSCKASGFDIQDTYMHWVKQRPGQGLEWMGRIDPASGHTKYDPKFQVRVTITRDTSTSTVYLELSSLRSEDTAVYYCARSGGLPDVWGQGTTVTVSSASTKGPSVFPLAPSSKSTSGGTAALGCLVKDYFPEPVTVSWNSGALTSGVHTFPAVLQSSGLYSLSSVVTVPSSSLGTQTYICNVNHKPSNTKVDKKVEPKSCDKTHTCPPCPAPEEFGGPSVFLFPPKPKDTLMISRTPEVTCVVVDVSHEDPEVKFNWYVDGVEVHNAKTKPREEQYNSTYRVVSVLTVLHQDWLNGKEYKCKVSNKALPASIEKTISKAKGQPREPQVYTLPPSRDELTKNQVSLTCLVKGFYPSDIAVEWESNGQPENNYKTTPPVLDSDGSFFLYSKLTVDKSRWQQGNVFSCSVMHEALHNHYTQKSLSLSPGK

SEQ ID NO: 509 - protein, 446 aa, Artificial Sequence
  Description of Artificial Sequence: Synthetic polypeptide
QVQLVQSGAEVKKPGASVKVSCKASGFDIQDTYMHWVKQRPGQGLEWMGRIDPASGHTKYDPKFQVRVTITRDTSTSTVYLELSSLRSEDTAVYYCARSGGLPDVWGQGTTVTVSSASTKGPSVFPLAPSSKSTSGGTAALGCLVKDYFPEPVTVSWNSGALTSGVHTFPAVLQSSGLYSLSSVVTVPSSSLGTQTYICNVNHKPSNTKVDKKVEPKSCDKTHTCPPCPAPELLGGPSVFLFPPKPKDTLMISRTPEVTCVVVAVSHEDPEVKFNWYVDGVEVHNAKTKPREEQYGSTYRVVSVLTVLHQDWLNGKEYKCKVSNKALPAPIEKTISKAKGQPREPQVYTLPPSRDELTKNQVSLTCLVKGFYPSDIAVEWESNGQPENNYKTTPPVLDSDGSFFLYSKLTVDKSRWQQGNVFSCSVMHEALHNHYTQKSLSLSPGK

SEQ ID NO: 510 - protein, 446 aa, Artificial Sequence
  Description of Artificial Sequence: Synthetic polypeptide
QVQLVQSGAEVKKPGASVKVSCKASGFDIQDTYMHWVKQRPGQGLEWMGRIDPASGHTKYDPKFQVRVTITRDTSTSTVYLELSSLRSEDTAVYYCARSGGLPDVWGQGTTVTVSSASTKGPSVFPLAPSSKSTSGGTAALGCLVKDYFPEPVTVSWNSGALTSGVHTFPAVLQSSGLYSLSSVVTVPSSSLGTQTYICNVNHKPSNTKVDKKVEPKSCDKTHTCPPCPAPELLGGPSVFLFPPKPKDTLMISRTPEVTCVVVDVSHEDPEVKFNWYVDGVEVHNAKTKPREEQYGSTYRVVSVLTVLHQDWLNGKEYKCKVSNKALPAPIEKTISKAKGQPREPQVYTLPPSRDELTKNQVSLTCLVKGFYPSDIAVEWESNGQPENNYKTTPPVLDSDGSFFLYSKLTVDKSRWQQGNVFSCSVMHEALHNHYTQKSLSLSPGK

SEQ ID NO: 511 - protein, 443 aa, Artificial Sequence
  Description of Artificial Sequence: Synthetic polypeptide
QVQLVQSGAEVKKPGASVKVSCKASGFDIQDTYMHWVKQRPGQGLEWMGRIDPASGHTKYDPKFQVRVTITRDTSTSTVYLELSSLRSEDTAVYYCARSGGLPDVWGQGTTVTVSSASTKGPSVFPLAPCSRSTSESTAALGCLVKDYFPEPVTVSWNSGALTSGVHTFPAVLQSSGLYSLSSVVTVPSSSLGTKTYTCNVDHKPSNTKVDKRVESKYGPPCPPCPAPEFLGGPSVFLFPPKPKDTLMISRTPEVTCVVVDVSQEDPEVQFNWYVDGVEVHNAKTKPREEQFNSTYRVVSVLTVLHQDWLNGKEYKCKVSNKGLPSSIEKTISKAKGQPREPQVYTLPPSQEEMTKNQVSLTCLVKGFYPSDIAVEWESNGQPENNYKTTPPVLDSDGSFFLYSRLTVDKSRWQEGNVFSCSVMHEALHNHYTQKSLSLSLGK

SEQ ID NO: 512 - protein, 443 aa, Artificial Sequence
  Description of Artificial Sequence: Synthetic polypeptide
QVQLVQSGAEVKKPGASVKVSCKASGFDIQDTYMHWVKQRPGQGLEWMGRIDPASGHTKYDPKFQVRVTITRDTSTSTVYLELSSLRSEDTAVYYCARSGGLPDVWGQGTTVTVSSASTKGPSVFPLAPCSRSTSESTAALGCLVKDYFPEPVTVSWNSGALTSGVHTFPAVLQSSGLYSLSSVVTVPSSSLGTKTYTCNVDHKPSNTKVDKRVESKYGPPCPPCPAPEFEGGPSVFLFPPKPKDTLMISRTPEVTCVVVDVSQEDPEVQFNWYVDGVEVHNAKTKPREEQFNSTYRVVSVLTVLHQDWLNGKEYKCKVSNKGLPSSIEKTISKAKGQPREPQVYTLPPSQEEMTKNQVSLTCLVKGFYPSDIAVEWESNGQPENNYKTTPPVLDSDGSFFLYSRLTVDKSRWQEGNVFSCSVMHEALHNHYTQKSLSLSLGK

SEQ ID NO: 513 - protein, 443 aa, Artificial Sequence
  Description of Artificial Sequence: Synthetic polypeptide
QVQLVQSGAEVKKPGASVKVSCKASGFDIQDTYMHWVKQRPGQGLEWMGRIDPASGHTKYDPKFQVRVTITRDTSTSTVYLELSSLRSEDTAVYYCARSGGLPDVWGQGTTVTVSSASTKGPSVFPLAPCSRSTSESTAALGCLVKDYFPEPVTVSWNSGALTSGVHTFPAVLQSSGLYSLSSVVTVPSSSLGTKTYTCNVDHKPSNTKVDKRVESKYGPPCPPCPAPEAAGGPSVFLFPPKPKDTLMISRTPEVTCVVVDVSQEDPEVQFNWYVDGVEVHNAKTKPREEQFNSTYRVVSVLTVLHQDWLNGKEYKCKVSNKGLPSSIEKTISKAKGQPREPQVYTLPPSQEEMTKNQVSLTCLVKGFYPSDIAVEWESNGQPENNYKTTPPVLDSDGSFFLYSRLTVDKSRWQEGNVFSCSVMHEALHNHYTQKSLSLSLGK

SEQ ID NO: 514 - protein, 213 aa, Artificial Sequence
  Description of Artificial Sequence: Synthetic polypeptide
EIVLTQSPGTLSLSPGERATLSCRASSSVSYMYWYQQKPGQAPRPLIYATSNLASGIPDRFSGSGSGTDFTLTISRLEPEDFAVYYCQQWEGNPRTFGGGTKLEIKRTVAAPSVFIFPPSDEQLKSGTASVVCLLNNFYPREAKVQWKVDNALQSGNSQESVTEQDSKDSTYSLSSTLTLSKADYEKHKVYACEVTHQGLSSPVTKSFNRGEC

SEQ ID NO: 515 - protein, 326 aa, Unknown
  Description of Unknown: IgG2 constant region sequence
ASTKGPSVFPLAPCSRSTSESTAALGCLVKDYFPEPVTVSWNSGALTSGVHTFPAVLQSSGLYSLSSVVTVPSSNFGTQTYTCNVDHKPSNTKVDKTVERKCCVECPPCPAPPVAGPSVFLFPPKPKDTLMISRTPEVTCVVVDVSHEDPEVQFNWYVDGVEVHNAKTKPREEQFNSTFRVVSVLTVVHQDWLNGKEYKCKVSNKGLPAPIEKTISKTKGQPREPQVYTLPPSREEMTKNQVSLTCLVKGFYPSDIAVEWESNGQPENNYKTTPPMLDSDGSFFLYSKLTVDKSRWQQGNVFSCSVMHEALHNHYTQKSLSLSPGK

SEQ ID NO: 516-600 - skipped (85 entries)

SEQ ID NO: 601 - protein, 5 aa, Artificial Sequence
  Description of Artificial Sequence: Synthetic peptide
DTYMH

SEQ ID NO: 602 - protein, 5 aa, Artificial Sequence
  Description of Artificial Sequence: Synthetic peptide
KYDIN

SEQ ID NO: 603 - protein, 10 aa, Artificial Sequence
  Description of Artificial Sequence: Synthetic peptide
GFEIQDTYMH

SEQ ID NO: 604 - protein, 10 aa, Artificial Sequence
  Description of Artificial Sequence: Synthetic peptide
GFDPQDTYMH

SEQ ID NO: 605 - protein, 10 aa, Artificial Sequence
  Description of Artificial Sequence: Synthetic peptide
GFDVQDTYMH

SEQ ID NO: 606 - protein, 10 aa, Artificial Sequence
  Description of Artificial Sequence: Synthetic peptide
GFDIGDTYMH

SEQ ID NO: 607 - protein, 10 aa, Artificial Sequence
  Description of Artificial Sequence: Synthetic peptide
GFDISDTYMH

SEQ ID NO: 608 - protein, 10 aa, Artificial Sequence
  Description of Artificial Sequence: Synthetic peptide
GFDIVDTYMH

SEQ ID NO: 609 - protein, 10 aa, Artificial Sequence
  Description of Artificial Sequence: Synthetic peptide
GFDIQDAYMH

SEQ ID NO: 610 - protein, 10 aa, Artificial Sequence
  Description of Artificial Sequence: Synthetic peptide
GFDIQDSYMH

SEQ ID NO: 611 - protein, 10 aa, Artificial Sequence
  Description of Artificial Sequence: Synthetic peptide
GFDIQDTFMH

SEQ ID NO: 612 - protein, 10 aa, Artificial Sequence
  Description of Artificial Sequence: Synthetic peptide
GFDIQDTYIH

SEQ ID NO: 613 - protein, 10 aa, Artificial Sequence
  Description of Artificial Sequence: Synthetic peptide
GFDLQDTYMH

SEQ ID NO: 614 - protein, 10 aa, Artificial Sequence
  Description of Artificial Sequence: Synthetic peptide
GFDIQDTYLH

SEQ ID NO: 615 - protein, 10 aa, Artificial Sequence
  Description of Artificial Sequence: Synthetic peptide
GFDIGDTFIH

SEQ ID NO: 616 - protein, 10 aa, Artificial Sequence
  Description of Artificial Sequence: Synthetic peptide
GFDIGDTFMH

SEQ ID NO: 617 - protein, 10 aa, Artificial Sequence
  Description of Artificial Sequence: Synthetic peptide
GFDIGDTYIH

SEQ ID NO: 618 - protein, 10 aa, Artificial Sequence
  Description of Artificial Sequence: Synthetic peptide
GFDIQDTFIH

SEQ ID NO: 619 - protein, 10 aa, Artificial Sequence
  Description of Artificial Sequence: Synthetic peptide
GFDIQDTFMH

SEQ ID NO: 620 - protein, 10 aa, Artificial Sequence
  Description of Artificial Sequence: Synthetic peptide
GFDIQDTYIH

SEQ ID NO: 621 - protein, 10 aa, Artificial Sequence
  Description of Artificial Sequence: Synthetic peptide
GFDISDTFIH

SEQ ID NO: 622 - protein, 10 aa, Artificial Sequence
  Description of Artificial Sequence: Synthetic peptide
GFDISDTFMH

SEQ ID NO: 623 - protein, 10 aa, Artificial Sequence
  Description of Artificial Sequence: Synthetic peptide
GFDISDTYIH

SEQ ID NO: 624 - protein, 10 aa, Artificial Sequence
  Description of Artificial Sequence: Synthetic peptide
GFDISDTYMH

SEQ ID NO: 625 - protein, 10 aa, Artificial Sequence
  Description of Artificial Sequence: Synthetic peptide
GFDIVDTFIH

SEQ ID NO: 626 - protein, 10 aa, Artificial Sequence
  Description of Artificial Sequence: Synthetic peptide
GFDIVDTFMH

SEQ ID NO: 627 - protein, 10 aa, Artificial Sequence
  Description of Artificial Sequence: Synthetic peptide
GFDIVDTYIH

SEQ ID NO: 628 - protein, 10 aa, Artificial Sequence
  Description of Artificial Sequence: Synthetic peptide
GFDPGDTFIH

SEQ ID NO: 629 - protein, 10 aa, Artificial Sequence
  Description of Artificial Sequence: Synthetic peptide
GFDPGDTFMH

SEQ ID NO: 630 - protein, 10 aa, Artificial Sequence
  Description of Artificial Sequence: Synthetic peptide
GFDPGDTYIH

SEQ ID NO: 631 - protein, 10 aa, Artificial Sequence
  Description of Artificial Sequence: Synthetic peptide
GFDPGDTYMH

SEQ ID NO: 632 - protein, 10 aa, Artificial Sequence
  Description of Artificial Sequence: Synthetic peptide
GFDPQDTFIH

SEQ ID NO: 633 - protein, 10 aa, Artificial Sequence
  Description of Artificial Sequence: Synthetic peptide
GFDPQDTFMH

SEQ ID NO: 634 - protein, 10 aa, Artificial Sequence
  Description of Artificial Sequence: Synthetic peptide
GFDPQDTYIH

SEQ ID NO: 635 - protein, 10 aa, Artificial Sequence
  Description of Artificial Sequence: Synthetic peptide
GFDPQDTYMH

SEQ ID NO: 636 - protein, 10 aa, Artificial Sequence
  Description of Artificial Sequence: Synthetic peptide
GFDPSDTFIH

SEQ ID NO: 637 - protein, 10 aa, Artificial Sequence
  Description of Artificial Sequence: Synthetic peptide
GFDPSDTFMH

SEQ ID NO: 638 - protein, 10 aa, Artificial Sequence
  Description of Artificial Sequence: Synthetic peptide
GFDPSDTYIH

SEQ ID NO: 639 - protein, 10 aa, Artificial Sequence
  Description of Artificial Sequence: Synthetic peptide
GFDPSDTYMH

SEQ ID NO: 640 - protein, 10 aa, Artificial Sequence
  Description of Artificial Sequence: Synthetic peptide
GFDPVDTFIH

SEQ ID NO: 641 - protein, 10 aa, Artificial Sequence
  Description of Artificial Sequence: Synthetic peptide
GFDPVDTFMH

SEQ ID NO: 642 - protein, 10 aa, Artificial Sequence
  Description of Artificial Sequence: Synthetic peptide
GFDPVDTYIH

SEQ ID NO: 643 - protein, 10 aa, Artificial Sequence
  Description of Artificial Sequence: Synthetic peptide
GFDPVDTYMH

SEQ ID NO: 644 - protein, 10 aa, Artificial Sequence
  Description of Artificial Sequence: Synthetic peptide
GFDVGDTFIH

SEQ ID NO: 645 - protein, 10 aa, Artificial Sequence
  Description of Artificial Sequence: Synthetic peptide
GFDVGDTFMH

SEQ ID NO: 646 - protein, 10 aa, Artificial Sequence
  Description of Artificial Sequence: Synthetic peptide
GFDVGDTYIH

SEQ ID NO: 647 - protein, 10 aa, Artificial Sequence
  Description of Artificial Sequence: Synthetic peptide
GFDVGDTYMH

SEQ ID NO: 648 - protein, 10 aa, Artificial Sequence
  Description of Artificial Sequence: Synthetic peptide
GFDVQDTFIH

SEQ ID NO: 649 - protein, 10 aa, Artificial Sequence
  Description of Artificial Sequence: Synthetic peptide
GFDVQDTFMH

SEQ ID NO: 650 - protein, 10 aa, Artificial Sequence
  Description of Artificial Sequence: Synthetic peptide
GFDVQDTYIH

SEQ ID NO: 651 - protein, 10 aa, Artificial Sequence
  Description of Artificial Sequence: Synthetic peptide
GFDVSDTFIH

SEQ ID NO: 652 - protein, 10 aa, Artificial Sequence
  Description of Artificial Sequence: Synthetic peptide
GFDVSDTFMH

SEQ ID NO: 653 - protein, 10 aa, Artificial Sequence
  Description of Artificial Sequence: Synthetic peptide
GFDVSDTYIH

SEQ ID NO: 654 - protein, 10 aa, Artificial Sequence
  Description of Artificial Sequence: Synthetic peptide
GFDVSDTYMH

SEQ ID NO: 655 - protein, 10 aa, Artificial Sequence
  Description of Artificial Sequence: Synthetic peptide
GFDVVDTFIH

SEQ ID NO: 656 - protein, 10 aa, Artificial Sequence
  Description of Artificial Sequence: Synthetic peptide
GFDVVDTFMH

SEQ ID NO: 657 - protein, 10 aa, Artificial Sequence
  Description of Artificial Sequence: Synthetic peptide
GFDVVDTYIH

SEQ ID NO: 658 - protein, 10 aa, Artificial Sequence
  Description of Artificial Sequence: Synthetic peptide
GFDVVDTYMH

SEQ ID NO: 659 - protein, 10 aa, Artificial Sequence
  Description of Artificial Sequence: Synthetic peptide
GFEIGDTFIH

SEQ ID NO: 660 - protein, 10 aa, Artificial Sequence
  Description of Artificial Sequence: Synthetic peptide
GFEIGDTFMH

SEQ ID NO: 661 - protein, 10 aa, Artificial Sequence
  Description of Artificial Sequence: Synthetic peptide
GFEIGDTYIH

SEQ ID NO: 662 - protein, 10 aa, Artificial Sequence
  Description of Artificial Sequence: Synthetic peptide
GFEIGDTYMH

SEQ ID NO: 663 - protein, 10 aa, Artificial Sequence
  Description of Artificial Sequence: Synthetic peptide
GFEIQDTFIH

SEQ ID NO: 664 - protein, 10 aa, Artificial Sequence
  Description of Artificial Sequence: Synthetic peptide
GFEIQDTFMH

SEQ ID NO: 665 - protein, 10 aa, Artificial Sequence
  Description of Artificial Sequence: Synthetic peptide
GFEIQDTYIH

SEQ ID NO: 666 - protein, 10 aa, Artificial Sequence
  Description of Artificial Sequence: Synthetic peptide
GFEIQDTYMH

SEQ ID NO: 667 - protein, 10 aa, Artificial Sequence
  Description of Artificial Sequence: Synthetic peptide
GFEISDTFIH

SEQ ID NO: 668 - protein, 10 aa, Artificial Sequence
  Description of Artificial Sequence: Synthetic peptide
GFEISDTFMH

SEQ ID NO: 669 - protein, 10 aa, Artificial Sequence
  Description of Artificial Sequence: Synthetic peptide
GFEISDTYIH

SEQ ID NO: 670 - protein, 10 aa, Artificial Sequence
  Description of Artificial Sequence: Synthetic peptide
GFEISDTYMH

SEQ ID NO: 671 - protein, 10 aa, Artificial Sequence
  Description of Artificial Sequence: Synthetic peptide
GFEIVDTFIH

SEQ ID NO: 672 - protein, 10 aa, Artificial Sequence
  Description of Artificial Sequence: Synthetic peptide
GFEIVDTFMH

SEQ ID NO: 673 - protein, 10 aa, Artificial Sequence
  Description of Artificial Sequence: Synthetic peptide
GFEIVDTYIH

SEQ ID NO: 674 - protein, 10 aa, Artificial Sequence
  Description of Artificial Sequence: Synthetic peptide
GFEIVDTYMH

SEQ ID NO: 675 - protein, 10 aa, Artificial Sequence
  Description of Artificial Sequence: Synthetic peptide
GFEPGDTFIH

SEQ ID NO: 676 - protein, 10 aa, Artificial Sequence
  Description of Artificial Sequence: Synthetic peptide
GFEPGDTFMH

SEQ ID NO: 677 - protein, 10 aa, Artificial Sequence
  Description of Artificial Sequence: Synthetic peptide
GFEPGDTYIH

SEQ ID NO: 678 - protein, 10 aa, Artificial Sequence
  Description of Artificial Sequence: Synthetic peptide
GFEPGDTYMH

SEQ ID NO: 679 - protein, 10 aa, Artificial Sequence
  Description of Artificial Sequence: Synthetic peptide
GFEPQDTFIH

SEQ ID NO: 680 - protein, 10 aa, Artificial Sequence
  Description of Artificial Sequence: Synthetic peptide
GFEPQDTFMH

SEQ ID NO: 681 - protein, 10 aa, Artificial Sequence
  Description of Artificial Sequence: Synthetic peptide
GFEPQDTYIH

SEQ ID NO: 682 - protein, 10 aa, Artificial Sequence
  Description of Artificial Sequence: Synthetic peptide
GFEPQDTYMH

SEQ ID NO: 683 - protein, 10 aa, Artificial Sequence
  Description of Artificial Sequence: Synthetic peptide
GFEPSDTFIH

SEQ ID NO: 684 - protein, 10 aa, Artificial Sequence
  Description of Artificial Sequence: Synthetic peptide
GFEPSDTFMH

SEQ ID NO: 685 - protein, 10 aa, Artificial Sequence
  Description of Artificial Sequence: Synthetic peptide
GFEPSDTYIH

SEQ ID NO: 686 - protein, 10 aa, Artificial Sequence
  Description of Artificial Sequence: Synthetic peptide
GFEPSDTYMH

SEQ ID NO: 687 - protein, 10 aa, Artificial Sequence
  Description of Artificial Sequence: Synthetic peptide
GFEPVDTFIH

SEQ ID NO: 688 - protein, 10 aa, Artificial Sequence
  Description of Artificial Sequence: Synthetic peptide
GFEPVDTFMH

SEQ ID NO: 689 - protein, 10 aa, Artificial Sequence
  Description of Artificial Sequence: Synthetic peptide
GFEPVDTYIH

SEQ ID NO: 690 - protein, 10 aa, Artificial Sequence
  Description of Artificial Sequence: Synthetic peptide
GFEPVDTYMH

SEQ ID NO: 691 - protein, 10 aa, Artificial Sequence
  Description of Artificial Sequence: Synthetic peptide
GFEVGDTFIH

SEQ ID NO: 692 - protein, 10 aa, Artificial Sequence
  Description of Artificial Sequence: Synthetic peptide
GFEVGDTFMH

SEQ ID NO: 693 - protein, 10 aa, Artificial Sequence
  Description of Artificial Sequence: Synthetic peptide
GFEVGDTYIH

SEQ ID NO: 694 - protein, 10 aa, Artificial Sequence
  Description of Artificial Sequence: Synthetic peptide
GFEVGDTYMH

SEQ ID NO: 695 - protein, 10 aa, Artificial Sequence
  Description of Artificial Sequence: Synthetic peptide
GFEVQDTFIH

SEQ ID NO: 696 - protein, 10 aa, Artificial Sequence
  Description of Artificial Sequence: Synthetic peptide
GFEVQDTFMH

SEQ ID NO: 697 - protein, 10 aa, Artificial Sequence
  Description of Artificial Sequence: Synthetic peptide
GFEVQDTYIH

SEQ ID NO: 698 - protein, 10 aa, Artificial Sequence
  Description of Artificial Sequence: Synthetic peptide
GFEVQDTYMH

SEQ ID NO: 699 - protein, 10 aa, Artificial Sequence
  Description of Artificial Sequence: Synthetic peptide
GFEVSDTFIH

SEQ ID NO: 700 - protein, 10 aa, Artificial Sequence
  Description of Artificial Sequence: Synthetic peptide
GFEVSDTFMH

SEQ ID NO: 701 - protein, 10 aa, Artificial Sequence
  Description of Artificial Sequence: Synthetic peptide
GFEVSDTYIH

SEQ ID NO: 702 - protein, 10 aa, Artificial Sequence
  Description of Artificial Sequence: Synthetic peptide
GFEVSDTYMH

SEQ ID NO: 703 - protein, 10 aa, Artificial Sequence
  Description of Artificial Sequence: Synthetic peptide
GFEVVDTFIH

SEQ ID NO: 704 - protein, 10 aa, Artificial Sequence
  Description of Artificial Sequence: Synthetic peptide
GFEVVDTFMH

SEQ ID NO: 705 - protein, 10 aa, Artificial Sequence
  Description of Artificial Sequence: Synthetic peptide
GFEVVDTYIH

SEQ ID NO: 706 - protein, 10 aa, Artificial Sequence
  Description of Artificial Sequence: Synthetic peptide
GFEVVDTYMH

SEQ ID NO: 707 - protein, 10 aa, Artificial Sequence
  Description of Artificial Sequence: Synthetic peptide
  MOD_RES (3)..(3): D or E
  MOD_RES (4)..(4): I, L, P or V
  MOD_RES (5)..(5): G, Q, S or V
  MOD_RES (7)..(7): A, S or T
  MOD_RES (8)..(8): F or Y
  MOD_RES (9)..(9): I, L or M
GFXXXDXXXH

SEQ ID NO: 708 - protein, 10 aa, Artificial Sequence
  Description of Artificial Sequence: Synthetic peptide
  MOD_RES (3)..(3): D or E
  MOD_RES (4)..(4): I, P or V
  MOD_RES (5)..(5): G, Q, S or V
  MOD_RES (8)..(8): F or Y
  MOD_RES (9)..(9): I or M
GFXXXDTXXH

SEQ ID NO: 709 - protein, 8 aa, Artificial Sequence
  Description of Artificial Sequence: Synthetic peptide
GFTFSSYW

SEQ ID NO: 710 - protein, 8 aa, Artificial Sequence
  Description of Artificial Sequence: Synthetic peptide
GGSFTGFY

SEQ ID NO: 711 - protein, 10 aa, Artificial Sequence
  Description of Artificial Sequence: Synthetic peptide
  MOD_RES (3)..(3): P, S, D, Q or N
  MOD_RES (5)..(5): T or R
  MOD_RES (6)..(6): N, T, Y or H
GYXFXXYGIS

SEQ ID NO: 712 - protein, 10 aa, Artificial Sequence
  Description of Artificial Sequence: Synthetic peptide
GYDFTYYGIS

SEQ ID NO: 713 - protein, 7 aa, Artificial Sequence
  Description of Artificial Sequence: Synthetic peptide
SRSYYWG

SEQ ID NO: 714 - protein, 7 aa, Artificial Sequence
  Description of Artificial Sequence: Synthetic peptide
TSNMGVV

SEQ ID NO: 715 - protein, 5 aa, Artificial Sequence
  Description of Artificial Sequence: Synthetic peptide
LYGMN

SEQ ID NO: 716 - protein, 5 aa, Artificial Sequence
  Description of Artificial Sequence: Synthetic peptide
NYGMN

SEQ ID NO: 717 - protein, 10 aa, Artificial Sequence
  Description of Artificial Sequence: Synthetic peptide
GYTFTSSWMH

SEQ ID NO: 718 - protein, 10 aa, Artificial Sequence
  Description of Artificial Sequence: Synthetic peptide
GYTFTSYDIN

SEQ ID NO: 719 - protein, 5 aa, Artificial Sequence
  Description of Artificial Sequence: Synthetic peptide
SYFWS

SEQ ID NO: 720 - protein, 5 aa, Artificial Sequence
  Description of Artificial Sequence: Synthetic peptide
GYYWN

SEQ ID NO: 721 - protein, 8 aa, Artificial Sequence
  Description of Artificial Sequence: Synthetic peptide
GFTFSTYG

SEQ ID NO: 722 - protein, 5 aa, Artificial Sequence
  Description of Artificial Sequence: Synthetic peptide
TYGMS

SEQ ID NO: 723 - protein, 17 aa, Artificial Sequence
  Description of Artificial Sequence: Synthetic peptide
WIFPGDGRTDYNEKFKG

SEQ ID NO: 724 - protein, 10 aa, Artificial Sequence
  Description of Artificial Sequence: Synthetic peptide
RLDPASGHTK

SEQ ID NO: 725 - protein, 10 aa, Artificial Sequence
  Description of Artificial Sequence: Synthetic peptide
RIEPASGHTK

SEQ ID NO: 726 - protein, 10 aa, Artificial Sequence
  Description of Artificial Sequence: Synthetic peptide
RIDPESGHTK

SEQ ID NO: 727 - protein, 10 aa, Artificial Sequence
  Description of Artificial Sequence: Synthetic peptide
RIDPASGHTK

SEQ ID NO: 728 - protein, 10 aa, Artificial Sequence
  Description of Artificial Sequence: Synthetic peptide
RIDPAGGHTK

SEQ ID NO: 729 - protein, 10 aa, Artificial Sequence
  Description of Artificial Sequence: Synthetic peptide
RIDPASAHTK

SEQ ID NO: 730 - protein, 10 aa, Artificial Sequence
  Description of Artificial Sequence: Synthetic peptide
RIDPASGHIK

SEQ ID NO: 731 - protein, 10 aa, Artificial Sequence
  Description of Artificial Sequence: Synthetic peptide
RIDPASGHLK

SEQ ID NO: 732 - protein, 10 aa, Artificial Sequence
  Description of Artificial Sequence: Synthetic peptide
RIDPASGHVK

SEQ ID NO: 733 - protein, 7 aa, Artificial Sequence
  Description of Artificial Sequence: Synthetic peptide
YDPKFQV

SEQ ID NO: 734 - protein, 7 aa, Artificial Sequence
  Description of Artificial Sequence: Synthetic peptide
IDPKFQV

SEQ ID NO: 735 - protein, 7 aa, Artificial Sequence
  Description of Artificial Sequence: Synthetic peptide
LDPKFQV

SEQ ID NO: 736 - protein, 7 aa, Artificial Sequence
  Description of Artificial Sequence: Synthetic peptide
MDPKFQV

SEQ ID NO: 737 - protein, 7 aa, Artificial Sequence
  Description of Artificial Sequence: Synthetic peptide
SDPKFQV

SEQ ID NO: 738 - protein, 7 aa, Artificial Sequence
  Description of Artificial Sequence: Synthetic peptide
TDPKFQV

SEQ ID NO: 739 - protein, 7 aa, Artificial Sequence
  Description of Artificial Sequence: Synthetic peptide
VDPKFQV

SEQ ID NO: 740 - protein, 7 aa, Artificial Sequence
  Description of Artificial Sequence: Synthetic peptide
YIPKFQV

SEQ ID NO: 741 - protein, 7 aa, Artificial Sequence
  Description of Artificial Sequence: Synthetic peptide
YNPKFQV

SEQ ID NO: 742 - protein, 7 aa, Artificial Sequence
  Description of Artificial Sequence: Synthetic peptide
YRPKFQV

SEQ ID NO: 743 - protein, 7 aa, Artificial Sequence
  Description of Artificial Sequence: Synthetic peptide
YSPKFQV

SEQ ID NO: 744 - protein, 7 aa, Artificial Sequence
  Description of Artificial Sequence: Synthetic peptide
YDPKFRV

SEQ ID NO: 745 - protein, 7 aa, Artificial Sequence
  Description of Artificial Sequence: Synthetic peptide
YDPKFQA

SEQ ID NO: 746 - protein, 7 aa, Artificial Sequence
  Description of Artificial Sequence: Synthetic peptide
YDPKFQD

SEQ ID NO: 747 - protein, 7 aa, Artificial Sequence
  Description of Artificial Sequence: Synthetic peptide
YDPKFQE

SEQ ID NO: 748 - protein, 7 aa, Artificial Sequence
  Description of Artificial Sequence: Synthetic peptide
YDPKFQG

SEQ ID NO: 749 - protein, 7 aa, Artificial Sequence
  Description of Artificial Sequence: Synthetic peptide
YDPKFQH

SEQ ID NO: 750 - protein, 7 aa, Artificial Sequence
  Description of Artificial Sequence: Synthetic peptide
YDPKFQK

SEQ ID NO: 751 - protein, 7 aa, Artificial Sequence
  Description of Artificial Sequence: Synthetic peptide
YDPKFQL

SEQ ID NO: 752 - protein, 7 aa, Artificial Sequence
  Description of Artificial Sequence: Synthetic peptide
YDPKFQM

SEQ ID NO: 753 - protein, 7 aa, Artificial Sequence
  Description of Artificial Sequence: Synthetic peptide
YDPKFQN

SEQ ID NO: 754 - protein, 7 aa, Artificial Sequence
  Description of Artificial Sequence: Synthetic peptide
YDPKFQP

SEQ ID NO: 755 - protein, 7 aa, Artificial Sequence
  Description of Artificial Sequence: Synthetic peptide
YDPKFQR

SEQ ID NO: 756 - protein, 7 aa, Artificial Sequence
  Description of Artificial Sequence: Synthetic peptide
YDPKFQS

SEQ ID NO: 757 - protein, 7 aa, Artificial Sequence
  Description of Artificial Sequence: Synthetic peptide
YDPKFQT

SEQ ID NO: 758 - protein, 17 aa, Artificial Sequence
  Description of Artificial Sequence: Synthetic peptide
RIEPASGHIKYDPKFQG

SEQ ID NO: 759 - protein, 17 aa, Artificial Sequence
  Description of Artificial Sequence: Synthetic peptide
RIEPASGHIKYSPKFQG

SEQ ID NO: 760 - protein, 17 aa, Artificial Sequence
  Description of Artificial Sequence: Synthetic peptide
RIEPASGHVKYSPKFQV

SEQ ID NO: 761 - protein, 17 aa, Artificial Sequence
  Description of Artificial Sequence: Synthetic peptide
RIEPASGHVKYDPKFQT

SEQ ID NO: 762 - protein, 17 aa, Artificial Sequence
  Description of Artificial Sequence: Synthetic peptide
RIDPASGHIKYDPKFQK

SEQ ID NO: 763 - protein, 17 aa, Artificial Sequence
  Description of Artificial Sequence: Synthetic peptide
RIDPASGHVKIDPKFQV

SEQ ID NO: 764 - protein, 17 aa, Artificial Sequence
  Description of Artificial Sequence: Synthetic peptide
RIDPASGHLKYDPKFQV

SEQ ID NO: 765 - protein, 17 aa, Artificial Sequence
  Description of Artificial Sequence: Synthetic peptide
RIDPASGHLKYDPKFQR

SEQ ID NO: 766 - protein, 17 aa, Artificial Sequence
  Description of Artificial Sequence: Synthetic peptide
RIDPASGHLKYDPKFQN

SEQ ID NO: 767 - protein, 17 aa, Artificial Sequence
  Description of Artificial Sequence: Synthetic peptide
RIEPASGHLKYDPKFQE

SEQ ID NO: 768 - protein, 5 aa, Artificial Sequence
  Description of Artificial Sequence: Synthetic peptide
PASGH

SEQ ID NO: 769 - protein, 17 aa, Artificial Sequence
  Description of Artificial Sequence: Synthetic peptide
RIDPASGHTKYDPKFQV

SEQ ID NO: 770 - protein, 17 aa, Artificial Sequence
  Description of Artificial Sequence: Synthetic peptide
RIDPASGHLKYDPKFQG

SEQ ID NO: 771 - protein, 17 aa, Artificial Sequence
  Description of Artificial Sequence: Synthetic peptide
RIDPASGHTKYDPKFQG

SEQ ID NO: 772 - protein, 17 aa, Artificial Sequence
  Description of Artificial Sequence: Synthetic peptide
RIDPASGHSKYDPKFQV

SEQ ID NO: 773 - protein, 17 aa, Artificial Sequence
  Description of Artificial Sequence: Synthetic peptide
RIDPASGHYKYDPKFQV

SEQ ID NO: 774 - protein, 17 aa, Artificial Sequence
  Description of Artificial Sequence: Synthetic peptide
  MOD_RES (2)..(2): I or L
  MOD_RES (3)..(3): D or E
  MOD_RES (5)..(5): A or E
  MOD_RES (6)..(6): G or S
  MOD_RES (7)..(7): A or G
  MOD_RES (9)..(9): I, L, T or V
  MOD_RES (11)..(11): I, L, M, S, T, V or Y
  MOD_RES (12)..(12): D, I, N, R or S
  MOD_RES (16)..(16): Q or R
  MOD_RES (17)..(17): A, D, E, G, H, K, L, M, N, P, R, S, T or V
RXXPXXXHXKXXPKFXX

SEQ ID NO: 775 - protein, 8 aa, Artificial Sequence
  Description of Artificial Sequence: Synthetic peptide
IKEDGSEK

SEQ ID NO: 776 - protein, 7 aa, Artificial Sequence
  Description of Artificial Sequence: Synthetic peptide
INHRGNT

SEQ ID NO: 777 - protein, 17 aa, Artificial Sequence
  Description of Artificial Sequence: Synthetic peptide
  MOD_RES (4)..(4): T, P, S or A
  MOD_RES (8)..(8): N, G, V, K or A
  MOD_RES (9)..(9): T or K
  MOD_RES (10)..(10): H or N
  MOD_RES (13)..(13): Q or R
  MOD_RES (14)..(14): K or M
  MOD_RES (15)..(15): L or H
WISXYNGXXXYAXXXQG

SEQ ID NO: 778 - protein, 17 aa, Artificial Sequence
  Description of Artificial Sequence: Synthetic peptide
WISTYNGNTHYARMLQG

SEQ ID NO: 779 - protein, 16 aa, Artificial Sequence
  Description of Artificial Sequence: Synthetic peptide
SIYYNGRTYYNPSLKS

SEQ ID NO: 780 - protein, 16 aa, Artificial Sequence
  Description of Artificial Sequence: Synthetic peptide
HILWDDREYSNPALKS

SEQ ID NO: 781 - protein, 17 aa, Artificial Sequence
  Description of Artificial Sequence: Synthetic peptide
WINTYTGEPTYADDFKG

SEQ ID NO: 782 - protein, 8 aa, Artificial Sequence
  Description of Artificial Sequence: Synthetic peptide
IHPNSGGT

SEQ ID NO: 783 - protein, 10 aa, Artificial Sequence
  Description of Artificial Sequence: Synthetic peptide
  MOD_RES (8)..(8): N or Y
WLNPNSGXTG

SEQ ID NO: 784 - protein, 16 aa, Artificial Sequence
  Description of Artificial Sequence: Synthetic peptide
YIYYSGNTKYNPSLKS

SEQ ID NO: 785 - protein, 16 aa, Artificial Sequence
  Description of Artificial Sequence: Synthetic peptide
EINHAGNTNYNPSLKS

SEQ ID NO: 786 - protein, 8 aa, Artificial Sequence
  Description of Artificial Sequence: Synthetic peptide
ISGTGRTT

SEQ ID NO: 787 - protein, 17 aa, Artificial Sequence
  Description of Artificial Sequence: Synthetic peptide
WMNTYSGVTTYADDFKG

SEQ ID NO: 788 - protein, 7 aa, Artificial Sequence
  Description of Artificial Sequence: Synthetic peptide
YGPAMDY

SEQ ID NO: 789 - protein, 7 aa, Artificial Sequence
  Description of Artificial Sequence: Synthetic peptide
LGGLPDV

SEQ ID NO: 790 - protein, 7 aa, Artificial Sequence
  Description of Artificial Sequence: Synthetic peptide
SAGLPDV

SEQ ID NO: 791 - protein, 7 aa, Artificial Sequence
  Description of Artificial Sequence: Synthetic peptide
SGGAPDV

SEQ ID NO: 792 - protein, 7 aa, Artificial Sequence
  Description of Artificial Sequence: Synthetic peptide
SGGMPDV

SEQ ID NO: 793 - protein, 7 aa, Artificial Sequence
  Description of Artificial Sequence: Synthetic peptide
SGGLPEV

SEQ ID NO: 794 - protein, 7 aa, Artificial Sequence
  Description of Artificial Sequence: Synthetic peptide
SGGLPDK

SEQ ID NO: 795 - protein, 7 aa, Artificial Sequence
  Description of Artificial Sequence: Synthetic peptide
SGGLPDM

SEQ ID NO: 796 - protein, 7 aa, Artificial Sequence
  Description of Artificial Sequence: Synthetic peptide
SGGLPDQ

SEQ ID NO: 797 - protein, 7 aa, Artificial Sequence
  Description of Artificial Sequence: Synthetic peptide
SGGLPDR

SEQ ID NO: 798 - protein, 7 aa, Artificial Sequence
  Description of Artificial Sequence: Synthetic peptide
SGGLPDS

SEQ ID NO: 799 - protein, 7 aa, Artificial Sequence
  Description of Artificial Sequence: Synthetic peptide
SGGLPDT

SEQ ID NO: 800 - protein, 7 aa, Artificial Sequence
  Description of Artificial Sequence: Synthetic peptide
SGGLPDH

SEQ ID NO: 801 - protein, 7 aa, Artificial Sequence
  Description of Artificial Sequence: Synthetic peptide
SGGLPDF

SEQ ID NO: 802 - protein, 7 aa, Artificial Sequence
  Description of Artificial Sequence: Synthetic peptide
SGGSPDV

SEQ ID NO: 803 - protein, 9 aa, Artificial Sequence
  Description of Artificial Sequence: Synthetic peptide
ARSGGLPDM

SEQ ID NO: 804 - protein, 9 aa, Artificial Sequence
  Description of Artificial Sequence: Synthetic peptide
ARSGGLPDK

SEQ ID NO: 805 - protein, 6 aa, Artificial Sequence
  Description of Artificial Sequence: Synthetic peptide
SGGLPD

SEQ ID NO: 806 - protein, 9 aa, Artificial Sequence
  Description of Artificial Sequence: Synthetic peptide
ARSGGLPDF

SEQ ID NO: 807 - protein, 9 aa, Artificial Sequence
  Description of Artificial Sequence: Synthetic peptide
ARSGGLPDL

SEQ ID NO: 808 - protein, 7 aa, Artificial Sequence
  Description of Artificial Sequence: Synthetic peptide
SGGLPDE

SEQ ID NO: 809 - protein, 7 aa, Artificial Sequence
  Description of Artificial Sequence: Synthetic peptide
SGGLPDI

SEQ ID NO: 810 - protein, 7 aa, Artificial Sequence
  Description of Artificial Sequence: Synthetic peptide
SGGLPDK

SEQ ID NO: 811 - protein, 7 aa, Artificial Sequence
  Description of Artificial Sequence: Synthetic peptide
SGGLPDL

SEQ ID NO: 812 - protein, 7 aa, Artificial Sequence
  Description of Artificial Sequence: Synthetic peptide
SGGLPDM

SEQ ID NO: 813 - protein, 7 aa, Artificial Sequence
  Description of Artificial Sequence: Synthetic peptide
SGGLPDQ

SEQ ID NO: 814 - protein, 7 aa, Artificial Sequence
  Description of Artificial Sequence: Synthetic peptide
SGGLPDT

SEQ ID NO: 815 - protein, 7 aa, Artificial Sequence
  Description of Artificial Sequence: Synthetic peptide
SGGLPDW

SEQ ID NO: 816 - protein, 7 aa, Artificial Sequence
  Description of Artificial Sequence: Synthetic peptide
SGGLPDY

SEQ ID NO: 817 - protein, 7 aa, Artificial Sequence
  Description of Artificial Sequence: Synthetic peptide
SGGMPDE

SEQ ID NO: 818 - protein, 7 aa, Artificial Sequence
  Description of Artificial Sequence: Synthetic peptide
SGGMPDI

SEQ ID NO: 819 - protein, 7 aa, Artificial Sequence
  Description of Artificial Sequence: Synthetic peptide
SGGMPDK

SEQ ID NO: 820 - protein, 7 aa, Artificial Sequence
  Description of Artificial Sequence: Synthetic peptide
SGGMPDL

SEQ ID NO: 821 - protein, 7 aa, Artificial Sequence
  Description of Artificial Sequence: Synthetic peptide
SGGMPDM

SEQ ID NO: 822 - protein, 7 aa, Artificial Sequence
  Description of Artificial Sequence: Synthetic peptide
SGGMPDQ

SEQ ID NO: 823 - protein, 7 aa, Artificial Sequence
  Description of Artificial Sequence: Synthetic peptide
SGGMPDT

SEQ ID NO: 824 - protein, 7 aa, Artificial Sequence
  Description of Artificial Sequence: Synthetic peptide
SGGMPDV

SEQ ID NO: 825 - protein, 7 aa, Artificial Sequence
  Description of Artificial Sequence: Synthetic peptide
SGGMPDW

SEQ ID NO: 826 - protein, 7 aa, Artificial Sequence
  Description of Artificial Sequence: Synthetic peptide
SGGMPDY

SEQ ID NO: 827 - protein, 7 aa, Artificial Sequence
  Description of Artificial Sequence: Synthetic peptide
  MOD_RES (1)..(1): L or S
  MOD_RES (2)..(2): A or G
  MOD_RES (4)..(4): A, L or M
  MOD_RES (6)..(6): D or E
  MOD_RES (7)..(7): K, M, Q, R, S, T, V or W
XXGXPXX

SEQ ID NO: 828 - protein, 7 aa, Artificial Sequence
  Description of Artificial Sequence: Synthetic peptide
  MOD_RES (4)..(4): L or M
  MOD_RES (7)..(7): E, I, K, L, M, Q, T, V, W or Y
SGGXPDX

SEQ ID NO: 829 - protein, 15 aa, Artificial Sequence
  Description of Artificial Sequence: Synthetic peptide
AREDYDSYYKYGMDV

SEQ ID NO: 830 - protein, 13 aa, Artificial Sequence
  Description of Artificial Sequence: Synthetic peptide
ASPFYDFWSGSDY

SEQ ID NO: 831 - protein, 15 aa, Artificial Sequence
  Description of Artificial Sequence: Synthetic peptide
  MOD_RES (8)..(8): S or A
  MOD_RES (9)..(9): Y or P
  MOD_RES (15)..(15): V, A or G
ENYYGSGXXRGGMDX

SEQ ID NO: 832 - protein, 15 aa, Artificial Sequence
  Description of Artificial Sequence: Synthetic peptide
ENYYGSGAYRGGMDV

SEQ ID NO: 833 - protein, 11 aa, Artificial Sequence
  Description of Artificial Sequence: Synthetic peptide
EDYGDYGAFDI

SEQ ID NO: 834 - protein, 14 aa, Artificial Sequence
  Description of Artificial Sequence: Synthetic peptide
MSRNYYGSSYVMDY

SEQ ID NO: 835 - protein, 10 aa, Artificial Sequence
  Description of Artificial Sequence: Synthetic peptide
DTAMDYAMAY

SEQ ID NO: 836 - protein, 13 aa, Artificial Sequence
  Description of Artificial Sequence: Synthetic peptide
DYGKYGDYYAMDY

SEQ ID NO: 837 - protein, 14 aa, Artificial Sequence
  Description of Artificial Sequence: Synthetic peptide
ARGDYYGYVSWFAY

SEQ ID NO: 838 - protein, 10 aa, Artificial Sequence
  Description of Artificial Sequence: Synthetic peptide
EVPETAAFEY

SEQ ID NO: 839 - protein, 10 aa, Artificial Sequence
  Description of Artificial Sequence: Synthetic peptide
ETGSYYGFDY

SEQ ID NO: 840 - protein, 12 aa, Artificial Sequence
  Description of Artificial Sequence: Synthetic peptide
GYCRSTTCYFDY

SEQ ID NO: 841 - protein, 14 aa, Artificial Sequence
  Description of Artificial Sequence: Synthetic peptide
TKERGDYYYGVFDY

SEQ ID NO: 842 - protein, 13 aa, Artificial Sequence
  Description of Artificial Sequence: Synthetic peptide
EGYVFDDYYATDY

SEQ ID NO: 843 - protein, 16 aa, Artificial Sequence
  Description of Artificial Sequence: Synthetic peptide
RSSQTIVHSNGDTYLD

SEQ ID NO: 844 - protein, 10 aa, Artificial Sequence
  Description of Artificial Sequence: Synthetic peptide
GASSSVSYMY

SEQ ID NO: 845 - protein, 10 aa, Artificial Sequence
  Description of Artificial Sequence: Synthetic peptide
WASSSVSYMY

SEQ ID NO: 846 - protein, 10 aa, Artificial Sequence
  Description of Artificial Sequence: Synthetic peptide
RASSSVIYMY

SEQ ID NO: 847 - protein, 10 aa, Artificial Sequence
  Description of Artificial Sequence: Synthetic peptide
RASSSVSFMY

SEQ ID NO: 848 - protein, 10 aa, Artificial Sequence
  Description of Artificial Sequence: Synthetic peptide
RASSSVSYLY

SEQ ID NO: 849 - protein, 10 aa, Artificial Sequence
  Description of Artificial Sequence: Synthetic peptide
RASSSVSYMR

SEQ ID NO: 850 - protein, 10 aa, Artificial Sequence
  Description of Artificial Sequence: Synthetic peptide
GASSSVSYMY

SEQ ID NO: 851 - protein, 9 aa, Artificial Sequence
  Description of Artificial Sequence: Synthetic peptide
ASSSVSYMY

SEQ ID NO: 852 - protein, 10 aa, Artificial Sequence
  Description of Artificial Sequence: Synthetic peptide
  MOD_RES (1)..(1): G, R or W
  MOD_RES (7)..(7): I or S
  MOD_RES (8)..(8): F or Y
  MOD_RES (9)..(9): L or M
  MOD_RES (10)..(10): R or Y
XASSSVXXXX

SEQ ID NO: 853 - protein, 12 aa, Artificial Sequence
  Description of Artificial Sequence: Synthetic peptide
QSILYSSNNKNY

SEQ ID NO: 854 - protein, 11 aa, Artificial Sequence
  Description of Artificial Sequence: Synthetic peptide
QSLVHSDGNTY

SEQ ID NO: 855 - protein, 11 aa, Artificial Sequence
  Description of Artificial Sequence: Synthetic peptide
RASQSVSSYLA

SEQ ID NO: 856 - protein, 11 aa, Artificial Sequence
  Description of Artificial Sequence: Synthetic peptide
RASQGISSALA

SEQ ID NO: 857 - protein, 10 aa, Artificial Sequence
  Description of Artificial Sequence: Synthetic peptide
SASSSVNYMH

SEQ ID NO: 858 - protein, 16 aa, Artificial Sequence
  Description of Artificial Sequence: Synthetic peptide
KSSQNIVHSDGNTYLE

SEQ ID NO: 859 - protein, 16 aa, Artificial Sequence
  Description of Artificial Sequence: Synthetic peptide
RSSQSIVHSNGNTYLD

SEQ ID NO: 860 - protein, 6 aa, Artificial Sequence
  Description of Artificial Sequence: Synthetic peptide
QNINVL

SEQ ID NO: 861 - protein, 14 aa, Artificial Sequence
  Description of Artificial Sequence: Synthetic peptide
  MOD_RES (10)..(10): G or A
  MOD_RES (11)..(11): L, S or Q
  MOD_RES (14)..(14): H or L
TSSSSDIGAXXGVX

SEQ ID NO: 862 - protein, 11 aa, Artificial Sequence
  Description of Artificial Sequence: Synthetic peptide
RASQSINNYLN

SEQ ID NO: 863 - protein, 12 aa, Artificial Sequence
  Description of Artificial Sequence: Synthetic peptide
RASQSVRSSYLA

SEQ ID NO: 864 - protein, 6 aa, Artificial Sequence
  Description of Artificial Sequence: Synthetic peptide
QTISSW

SEQ ID NO: 865 - protein, 16 aa, Artificial Sequence
  Description of Artificial Sequence: Synthetic peptide
RSSQNIVHSDGNTYLE

SEQ ID NO: 866 - protein, 7 aa, Artificial Sequence
  Description of Artificial Sequence: Synthetic peptide
KVSNRFS

SEQ ID NO: 867 - protein, 7 aa, Artificial Sequence
  Description of Artificial Sequence: Synthetic peptide
AKSNLAS

SEQ ID NO: 868 - protein, 7 aa, Artificial Sequence
  Description of Artificial Sequence: Synthetic peptide
ATPNLAS

SEQ ID NO: 869 - protein, 7 aa, Artificial Sequence
  Description of Artificial Sequence: Synthetic peptide
ATENLAS

SEQ ID NO: 870 - protein, 7 aa, Artificial Sequence
  Description of Artificial Sequence: Synthetic peptide
ATSLLAS

SEQ ID NO: 871 - protein, 7 aa, Artificial Sequence
  Description of Artificial Sequence: Synthetic peptide
ATSPLAS

SEQ ID NO: 872 - protein, 7 aa, Artificial Sequence
  Description of Artificial Sequence: Synthetic peptide
ATSNLTS

SEQ ID NO: 873 - protein, 7 aa, Artificial Sequence
  Description of Artificial Sequence: Synthetic peptide
  MOD_RES (2)..(2): K or T
  MOD_RES (3)..(3): E, P or S
  MOD_RES (4)..(4): L, N or P
  MOD_RES (6)..(6): A or T
AXXXLXS

SEQ ID NO: 874 - protein, 3 aa, Artificial Sequence
  Description of Artificial Sequence: Synthetic peptide
WAS

SEQ ID NO: 875 - protein, 3 aa, Artificial Sequence
  Description of Artificial Sequence: Synthetic peptide
KIS

SEQ ID NO: 876 - protein, 7 aa, Artificial Sequence
  Description of Artificial Sequence: Synthetic peptide
DASNRAT

SEQ ID NO: 877 - protein, 7 aa, Artificial Sequence
  Description of Artificial Sequence: Synthetic peptide
DASSLES

SEQ ID NO: 878 - protein, 7 aa, Artificial Sequence
  Description of Artificial Sequence: Synthetic peptide
STSNLAS

SEQ ID NO: 879 - protein, 7 aa, Artificial Sequence
  Description of Artificial Sequence: Synthetic peptide
KVSNRFS

SEQ ID NO: 880 - protein, 3 aa, Artificial Sequence
  Description of Artificial Sequence: Synthetic peptide
KAS

SEQ ID NO: 881 - protein, 7 aa, Artificial Sequence
  Description of Artificial Sequence: Synthetic peptide
GYYNRPS

SEQ ID NO: 882 - protein, 7 aa, Artificial Sequence
  Description of Artificial Sequence: Synthetic peptide
AASSLQS

SEQ ID NO: 883 - protein, 7 aa, Artificial Sequence
  Description of Artificial Sequence: Synthetic peptide
GASSRAT

SEQ ID NO: 884 - protein, 3 aa, Artificial Sequence
  Description of Artificial Sequence: Synthetic peptide
AAS

SEQ ID NO: 885 - protein, 7 aa, Artificial Sequence
  Description of Artificial Sequence: Synthetic peptide
KVSNRFS

SEQ ID NO: 886 - protein, 9 aa, Artificial Sequence
  Description of Artificial Sequence: Synthetic peptide
FQGSHVPYT

SEQ ID NO: 887 - protein, 9 aa, Artificial Sequence
  Description of Artificial Sequence: Synthetic peptide
HQWSGNPRT

SEQ ID NO: 888 - protein, 9 aa, Artificial Sequence
  Description of Artificial Sequence: Synthetic peptide
NQWSGNPRT

SEQ ID NO: 889 - protein, 9 aa, Artificial Sequence
  Description of Artificial Sequence: Synthetic peptide
SQWSGNPRT

SEQ ID NO: 890 - protein, 9 aa, Artificial Sequence
  Description of Artificial Sequence: Synthetic peptide
QQSSGNPRT

SEQ ID NO: 891 - protein, 9 aa, Artificial Sequence
  Description of Artificial Sequence: Synthetic peptide
QQWDGNPRT

SEQ ID NO: 892 - protein, 9 aa, Artificial Sequence
  Description of Artificial Sequence: Synthetic peptide
QQWHGNPRT

SEQ ID NO: 893 - protein, 9 aa, Artificial Sequence
  Description of Artificial Sequence: Synthetic peptide
QQWNGNPRT

SEQ ID NO: 894 - protein, 9 aa, Artificial Sequence
  Description of Artificial Sequence: Synthetic peptide
QQWQGNPRT

SEQ ID NO: 895 - protein, 9 aa, Artificial Sequence
  Description of Artificial Sequence: Synthetic peptide
QQWVGNPRT

SEQ ID NO: 896 - protein, 9 aa, Artificial Sequence
  Description of Artificial Sequence: Synthetic peptide
QQWSANPRT

SEQ ID NO: 897 - protein, 9 aa, Artificial Sequence
  Description of Artificial Sequence: Synthetic peptide
QQWSDNPRT

SEQ ID NO: 898 - protein, 9 aa, Artificial Sequence
  Description of Artificial Sequence: Synthetic peptide
QQWSQNPRT

SEQ ID NO: 899 - protein, 9 aa, Artificial Sequence
  Description of Artificial Sequence: Synthetic peptide
QQWSSNPRT

SEQ ID NO: 900 - protein, 9 aa, Artificial Sequence
  Description of Artificial Sequence: Synthetic peptide
QQWSGNPRS

SEQ ID NO: 901 - protein, 9 aa, Artificial Sequence
  Description of Artificial Sequence: Synthetic peptide
QQFSGNPRT

SEQ ID NO: 902 - protein, 9 aa, Artificial Sequence
  Description of Artificial Sequence: Synthetic peptide
QQHSGNPRT

SEQ ID NO: 903 - protein, 9 aa, Artificial Sequence
  Description of Artificial Sequence: Synthetic peptide
QQISGNPRT

SEQ ID NO: 904 - protein, 9 aa, Artificial Sequence
  Description of Artificial Sequence: Synthetic peptide
QQPSGNPRT

SEQ ID NO: 905 - protein, 9 aa, Artificial Sequence
  Description of Artificial Sequence: Synthetic peptide
QQRSGNPRT

SEQ ID NO: 906 - protein, 9 aa, Artificial Sequence
  Description of Artificial Sequence: Synthetic peptide
QQYSGNPRT

SEQ ID NO: 907 - protein, 9 aa, Artificial Sequence
  Description of Artificial Sequence: Synthetic peptide
QQWSGHPRT

SEQ ID NO: 908 - protein, 9 aa, Artificial Sequence
  Description of Artificial Sequence: Synthetic peptide
QQWSGLPRT

SEQ ID NO: 909 - protein, 9 aa, Artificial Sequence
  Description of Artificial Sequence: Synthetic peptide
QQWSGQPRT

SEQ ID NO: 910 - protein, 9 aa, Artificial Sequence
  Description of Artificial Sequence: Synthetic peptide
QQWSGSPRT

SEQ ID NO: 911 - protein, 9 aa, Artificial Sequence
  Description of Artificial Sequence: Synthetic peptide
QQWSGTPRT

SEQ ID NO: 912 - protein, 9 aa, Artificial Sequence
  Description of Artificial Sequence: Synthetic peptide
QQWSGMPRT

SEQ ID NO: 913 - protein, 9 aa, Artificial Sequence
  Description of Artificial Sequence: Synthetic peptide
QQWSGFPRT

SEQ ID NO: 914 - protein, 9 aa, Artificial Sequence
  Description of Artificial Sequence: Synthetic peptide
QQWSGKPRT

SEQ ID NO: 915 - protein, 9 aa, Artificial Sequence
  Description of Artificial Sequence: Synthetic peptide
QQWSGRPRT

SEQ ID NO: 916 - protein, 9 aa, Artificial Sequence
  Description of Artificial Sequence: Synthetic peptide
QQWSGDPRT

SEQ ID NO: 917 - protein, 9 aa, Artificial Sequence
  Description of Artificial Sequence: Synthetic peptide
QQWAGNPRT

SEQ ID NO: 918 - protein, 9 aa, Artificial Sequence
  Description of Artificial Sequence: Synthetic peptide
QQWYGNPRT

SEQ ID NO: 919 - protein, 9 aa, Artificial Sequence
  Description of Artificial Sequence: Synthetic peptide
QQWFGNPRT

SEQ ID NO: 920 - protein, 9 aa, Artificial Sequence
  Description of Artificial Sequence: Synthetic peptide
QQWQGNPRT

SEQ ID NO: 921 - protein, 5 aa, Artificial Sequence
  Description of Artificial Sequence: Synthetic peptide
GNPRT

SEQ ID NO: 922 - protein, 9 aa, Artificial Sequence
  Description of Artificial Sequence: Synthetic peptide
SQWSGNPRT

SEQ ID NO: 923 - protein, 9 aa, Artificial Sequence
  Description of Artificial Sequence: Synthetic peptide
QQWSGNPRS

SEQ ID NO: 924 - protein, 9 aa, Artificial Sequence
  Description of Artificial Sequence: Synthetic peptide
QQWSGTPRT

SEQ ID NO: 925 - protein, 9 aa, Artificial Sequence
  Description of Artificial Sequence: Synthetic peptide
QQWSGDPRT

SEQ ID NO: 926 - protein, 9 aa, Artificial Sequence
  Description of Artificial Sequence: Synthetic peptide
QQWSGFPRT

SEQ ID NO: 927 - protein, 9 aa, Artificial Sequence
  Description of Artificial Sequence: Synthetic peptide
QQWSGKPRT

SEQ ID NO: 928 - protein, 9 aa, Artificial Sequence
  Description of Artificial Sequence: Synthetic peptide
QQWSGRPRT

SEQ ID NO: 929 - protein, 9 aa, Artificial Sequence
  Description of Artificial Sequence: Synthetic peptide
QQWSGSPRT

SEQ ID NO: 930 - protein, 9 aa, Artificial Sequence
  Description of Artificial Sequence: Synthetic peptide
QQWDADPRT

SEQ ID NO: 931 - protein, 9 aa, Artificial Sequence
  Description of Artificial Sequence: Synthetic peptide
QQWDAFPRT

SEQ ID NO: 932 - protein, 9 aa, Artificial Sequence
  Description of Artificial Sequence: Synthetic peptide
QQWDAKPRT

SEQ ID NO: 933 - protein, 9 aa, Artificial Sequence
  Description of Artificial Sequence: Synthetic peptide
QQWDANPRT

SEQ ID NO: 934 - protein, 9 aa, Artificial Sequence
  Description of Artificial Sequence: Synthetic peptide
QQWDARPRT

SEQ ID NO: 935 - protein, 9 aa, Artificial Sequence
  Description of Artificial Sequence: Synthetic peptide
QQWDASPRT

SEQ ID NO: 936 - protein, 9 aa, Artificial Sequence
  Description of Artificial Sequence: Synthetic peptide
QQWDATPRT

SEQ ID NO: 937 - protein, 9 aa, Artificial Sequence
  Description of Artificial Sequence: Synthetic peptide
QQWDGDPRT

SEQ ID NO: 938 - protein, 9 aa, Artificial Sequence
  Description of Artificial Sequence: Synthetic peptide
QQWDGFPRT

SEQ ID NO: 939 - protein, 9 aa, Artificial Sequence
  Description of Artificial Sequence: Synthetic peptide
QQWDGKPRT

SEQ ID NO: 940 - protein, 9 aa, Artificial Sequence
  Description of Artificial Sequence: Synthetic peptide
QQWDGNPRT

SEQ ID NO: 941 - protein, 9 aa, Artificial Sequence
  Description of Artificial Sequence: Synthetic peptide
QQWDGRPRT

SEQ ID NO: 942 - protein, 9 aa, Artificial Sequence
  Description of Artificial Sequence: Synthetic peptide
QQWDGSPRT

SEQ ID NO: 943 - protein, 9 aa, Artificial Sequence
  Description of Artificial Sequence: Synthetic peptide
QQWDGTPRT

SEQ ID NO: 944 - protein, 9 aa, Artificial Sequence
  Description of Artificial Sequence: Synthetic peptide
QQWEADPRT

SEQ ID NO: 945 - protein, 9 aa, Artificial Sequence
  Description of Artificial Sequence: Synthetic peptide
QQWEAFPRT

SEQ ID NO: 946 - protein, 9 aa, Artificial Sequence
  Description of Artificial Sequence: Synthetic peptide
QQWEAKPRT

SEQ ID NO: 947 - protein, 9 aa, Artificial Sequence
  Description of Artificial Sequence: Synthetic peptide
QQWEANPRT

SEQ ID NO: 948 - protein, 9 aa, Artificial Sequence
  Description of Artificial Sequence: Synthetic peptide
QQWEARPRT

SEQ ID NO: 949 - protein, 9 aa, Artificial Sequence
  Description of Artificial Sequence: Synthetic peptide
QQWEASPRT

SEQ ID NO: 950 - protein, 9 aa, Artificial Sequence
  Description of Artificial Sequence: Synthetic peptide
QQWEATPRT

SEQ ID NO: 951 - protein, 9 aa, Artificial Sequence
  Description of Artificial Sequence: Synthetic peptide
QQWEGDPRT

SEQ ID NO: 952 - protein, 9 aa, Artificial Sequence
  Description of Artificial Sequence: Synthetic peptide
QQWEGFPRT

SEQ ID NO: 953 - protein, 9 aa, Artificial Sequence
  Description of Artificial Sequence: Synthetic peptide
QQWEGKPRT

SEQ ID NO: 954 - protein, 9 aa, Artificial Sequence
  Description of Artificial Sequence: Synthetic peptide
QQWEGRPRT

SEQ ID NO: 955 - protein, 9 aa, Artificial Sequence
  Description of Artificial Sequence: Synthetic peptide
QQWEGSPRT

SEQ ID NO: 956 - protein, 9 aa, Artificial Sequence
  Description of Artificial Sequence: Synthetic peptide
QQWEGTPRT

SEQ ID NO: 957 - protein, 9 aa, Artificial Sequence
  Description of Artificial Sequence: Synthetic peptide
QQWHADPRT

SEQ ID NO: 958 - protein, 9 aa, Artificial Sequence
  Description of Artificial Sequence: Synthetic peptide
QQWHAFPRT

SEQ ID NO: 959 - protein, 9 aa, Artificial Sequence
  Description of Artificial Sequence: Synthetic peptide
QQWHAKPRT

SEQ ID NO: 960 - protein, 9 aa, Artificial Sequence
  Description of Artificial Sequence: Synthetic peptide
QQWHANPRT

SEQ ID NO: 961 - protein, 9 aa, Artificial Sequence
  Description of Artificial Sequence: Synthetic peptide
QQWHARPRT

SEQ ID NO: 962 - protein, 9 aa, Artificial Sequence
  Description of Artificial Sequence: Synthetic peptide
QQWHASPRT

SEQ ID NO: 963 - protein, 9 aa, Artificial Sequence
  Description of Artificial Sequence: Synthetic peptide
QQWHATPRT

SEQ ID NO: 964 - protein, 9 aa, Artificial Sequence
  Description of Artificial Sequence: Synthetic peptide
QQWHGDPRT

SEQ ID NO: 965 - protein, 9 aa, Artificial Sequence
  Description of Artificial Sequence: Synthetic peptide
QQWHGFPRT

SEQ ID NO: 966 - protein, 9 aa, Artificial Sequence
  Description of Artificial Sequence: Synthetic peptide
QQWHGKPRT

SEQ ID NO: 967 - protein, 9 aa, Artificial Sequence
  Description of Artificial Sequence: Synthetic peptide
QQWHGNPRT

SEQ ID NO: 968 - protein, 9 aa, Artificial Sequence
  Description of Artificial Sequence: Synthetic peptide
QQWHGRPRT

SEQ ID NO: 969 - protein, 9 aa, Artificial Sequence
  Description of Artificial Sequence: Synthetic peptide
QQWHGSPRT

SEQ ID NO: 970 - protein, 9 aa, Artificial Sequence
  Description of Artificial Sequence: Synthetic peptide
QQWHGTPRT

SEQ ID NO: 971 - protein, 9 aa, Artificial Sequence
  Description of Artificial Sequence: Synthetic peptide
QQWNADPRT

SEQ ID NO: 972 - protein, 9 aa, Artificial Sequence
  Description of Artificial Sequence: Synthetic peptide
QQWNAFPRT

SEQ ID NO: 973 - protein, 9 aa, Artificial Sequence
  Description of Artificial Sequence: Synthetic peptide
QQWNAKPRT

SEQ ID NO: 974 - protein, 9 aa, Artificial Sequence
  Description of Artificial Sequence: Synthetic peptide
QQWNANPRT

SEQ ID NO: 975 - protein, 9 aa, Artificial Sequence
  Description of Artificial Sequence: Synthetic peptide
QQWNARPRT

SEQ ID NO: 976 - protein, 9 aa, Artificial Sequence
  Description of Artificial Sequence: Synthetic peptide
QQWNASPRT

SEQ ID NO: 977 - protein, 9 aa, Artificial Sequence
  Description of Artificial Sequence: Synthetic peptide
QQWNATPRT

SEQ ID NO: 978 - protein, 9 aa, Artificial Sequence
  Description of Artificial Sequence: Synthetic peptide
QQWNGDPRT

SEQ ID NO: 979 - protein, 9 aa, Artificial Sequence
  Description of Artificial Sequence: Synthetic peptide
QQWNGFPRT

SEQ ID NO: 980 - protein, 9 aa, Artificial Sequence
  Description of Artificial Sequence: Synthetic peptide
QQWNGKPRT

SEQ ID NO: 981 - protein, 9 aa, Artificial Sequence
  Description of Artificial Sequence: Synthetic peptide
QQWNGNPRT

SEQ ID NO: 982 - protein, 9 aa, Artificial Sequence
  Description of Artificial Sequence: Synthetic peptide
QQWNGRPRT

SEQ ID NO: 983 - protein, 9 aa, Artificial Sequence
  Description of Artificial Sequence: Synthetic peptide
QQWNGSPRT

SEQ ID NO: 984 - protein, 9 aa, Artificial Sequence
  Description of Artificial Sequence: Synthetic peptide
QQWNGTPRT

SEQ ID NO: 985 - protein, 9 aa, Artificial Sequence
  Description of Artificial Sequence: Synthetic peptide
QQWQADPRT

SEQ ID NO: 986 - protein, 9 aa, Artificial Sequence
  Description of Artificial Sequence: Synthetic peptide
QQWQAFPRT

SEQ ID NO: 987 - protein, 9 aa, Artificial Sequence
  Description of Artificial Sequence: Synthetic peptide
QQWQAKPRT

SEQ ID NO: 988 - protein, 9 aa, Artificial Sequence
  Description of Artificial Sequence: Synthetic peptide
QQWQANPRT

SEQ ID NO: 989 - protein, 9 aa, Artificial Sequence
  Description of Artificial Sequence: Synthetic peptide
QQWQARPRT

SEQ ID NO: 990 - protein, 9 aa, Artificial Sequence
  Description of Artificial Sequence: Synthetic peptide
QQWQASPRT

SEQ ID NO: 991 - protein, 9 aa, Artificial Sequence
  Description of Artificial Sequence: Synthetic peptide
QQWQATPRT

SEQ ID NO: 992 - protein, 9 aa, Artificial Sequence
  Description of Artificial Sequence: Synthetic peptide
QQWQGDPRT

SEQ ID NO: 993 - protein, 9 aa, Artificial Sequence
  Description of Artificial Sequence: Synthetic peptide
QQWQGFPRT

SEQ ID NO: 994 - protein, 9 aa, Artificial Sequence
  Description of Artificial Sequence: Synthetic peptide
QQWQGKPRT

SEQ ID NO: 995 - protein, 9 aa, Artificial Sequence
  Description of Artificial Sequence: Synthetic peptide
QQWQGRPRT

SEQ ID NO: 996 - protein, 9 aa, Artificial Sequence
  Description of Artificial Sequence: Synthetic peptide
QQWQGSPRT

SEQ ID NO: 997 - protein, 9 aa, Artificial Sequence
  Description of Artificial Sequence: Synthetic peptide
QQWQGTPRT

SEQ ID NO: 998 - protein, 9 aa, Artificial Sequence
  Description of Artificial Sequence: Synthetic peptide
QQWSADPRT

SEQ ID NO: 999 - protein, 9 aa, Artificial Sequence
  Description of Artificial Sequence: Synthetic peptide
QQWSAFPRT

SEQ ID NO: 1000 - protein, 9 aa, Artificial Sequence
  Description of Artificial Sequence: Synthetic peptide
QQWSAKPRT

SEQ ID NO: 1001 - protein, 9 aa, Artificial Sequence
  Description of Artificial Sequence: Synthetic peptide
QQWSANPRT

SEQ ID NO: 1002 - protein, 9 aa, Artificial Sequence
  Description of Artificial Sequence: Synthetic peptide
QQWSARPRT

SEQ ID NO: 1003 - protein, 9 aa, Artificial Sequence
  Description of Artificial Sequence: Synthetic peptide
QQWSASPRT

SEQ ID NO: 1004 - protein, 9 aa, Artificial Sequence
  Description of Artificial Sequence: Synthetic peptide
QQWSATPRT

SEQ ID NO: 1005 - protein, 9 aa, Artificial Sequence
  Description of Artificial Sequence: Synthetic peptide
NQWDAFPRT

SEQ ID NO: 1006 - protein, 9 aa, Artificial Sequence
  Description of Artificial Sequence: Synthetic peptide
NQWDAKPRT

SEQ ID NO: 1007 - protein, 9 aa, Artificial Sequence
  Description of Artificial Sequence: Synthetic peptide
NQWDANPRT

SEQ ID NO: 1008 - protein, 9 aa, Artificial Sequence
  Description of Artificial Sequence: Synthetic peptide
NQWDARPRT

SEQ ID NO: 1009 - protein, 9 aa, Artificial Sequence
  Description of Artificial Sequence: Synthetic peptide
NQWDASPRT

SEQ ID NO: 1010 - protein, 9 aa, Artificial Sequence
  Description of Artificial Sequence: Synthetic peptide
NQWDATPRT

SEQ ID NO: 1011 - protein, 9 aa, Artificial Sequence
  Description of Artificial Sequence: Synthetic peptide
NQWDGDPRT

SEQ ID NO: 1012 - protein, 9 aa, Artificial Sequence
  Description of Artificial Sequence: Synthetic peptide
NQWDGFPRT

SEQ ID NO: 1013 - protein, 9 aa, Artificial Sequence
  Description of Artificial Sequence: Synthetic peptide
NQWDGKPRT

SEQ ID NO: 1014 - protein, 9 aa, Artificial Sequence
  Description of Artificial Sequence: Synthetic peptide
NQWDGNPRT

SEQ ID NO: 1015 - protein, 9 aa, Artificial Sequence
  Description of Artificial Sequence: Synthetic peptide
NQWDGRPRT

SEQ ID NO: 1016 - protein, 9 aa, Artificial Sequence
  Description of Artificial Sequence: Synthetic peptide
NQWDGSPRT

SEQ ID NO: 1017 - protein, 9 aa, Artificial Sequence
  Description of Artificial Sequence: Synthetic peptide
NQWDGTPRT

SEQ ID NO: 1018 - protein, 9 aa, Artificial Sequence
  Description of Artificial Sequence: Synthetic peptide
NQWEADPRT

SEQ ID NO: 1019 - protein, 9 aa, Artificial Sequence
  Description of Artificial Sequence: Synthetic peptide
NQWEAFPRT

SEQ ID NO: 1020 - protein, 9 aa, Artificial Sequence
  Description of Artificial Sequence: Synthetic peptide
NQWEAKPRT

SEQ ID NO: 1021 - protein, 9 aa, Artificial Sequence
  Description of Artificial Sequence: Synthetic peptide
NQWEANPRT

SEQ ID NO: 1022 - protein, 9 aa, Artificial Sequence
  Description of Artificial Sequence: Synthetic peptide
NQWEARPRT

SEQ ID NO: 1023 - protein, 9 aa, Artificial Sequence
  Description of Artificial Sequence: Synthetic peptide
NQWEASPRT

SEQ ID NO: 1024 - protein, 9 aa, Artificial Sequence
  Description of Artificial Sequence: Synthetic peptide
NQWEATPRT

SEQ ID NO: 1025 - protein, 9 aa, Artificial Sequence
  Description of Artificial Sequence: Synthetic peptide
NQWEGDPRT

SEQ ID NO: 1026 - protein, 9 aa, Artificial Sequence
  Description of Artificial Sequence: Synthetic peptide
NQWEGFPRT

SEQ ID NO: 1027 - protein, 9 aa, Artificial Sequence
  Description of Artificial Sequence: Synthetic peptide
NQWEGKPRT

SEQ ID NO: 1028 - protein, 9 aa, Artificial Sequence
  Description of Artificial Sequence: Synthetic peptide
NQWEGNPRT

SEQ ID NO: 1029 - protein, 9 aa, Artificial Sequence
  Description of Artificial Sequence: Synthetic peptide
NQWEGRPRT

SEQ ID NO: 1030 - protein, 9 aa, Artificial Sequence
  Description of Artificial Sequence: Synthetic peptide
NQWEGSPRT

SEQ ID NO: 1031 - protein, 9 aa, Artificial Sequence
  Description of Artificial Sequence: Synthetic peptide
NQWEGTPRT

SEQ ID NO: 1032 - protein, 9 aa, Artificial Sequence
  Description of Artificial Sequence: Synthetic peptide
NQWHADPRT

SEQ ID NO: 1033 - protein, 9 aa, Artificial Sequence
  Description of Artificial Sequence: Synthetic peptide
NQWHAFPRT

SEQ ID NO: 1034 - protein, 9 aa, Artificial Sequence
  Description of Artificial Sequence: Synthetic peptide
NQWHAKPRT

SEQ ID NO: 1035 - protein, 9 aa, Artificial Sequence
  Description of Artificial Sequence: Synthetic peptide
NQWHANPRT

SEQ ID NO: 1036 - protein, 9 aa, Artificial Sequence
  Description of Artificial Sequence: Synthetic peptide
NQWHARPRT

SEQ ID NO: 1037 - protein, 9 aa, Artificial Sequence
  Description of Artificial Sequence: Synthetic peptide
NQWHASPRT

SEQ ID NO: 1038 - protein, 9 aa, Artificial Sequence
  Description of Artificial Sequence: Synthetic peptide
NQWHATPRT

SEQ ID NO: 1039 - protein, 9 aa, Artificial Sequence
  Description of Artificial Sequence: Synthetic peptide
NQWHGDPRT

SEQ ID NO: 1040 - protein, 9 aa, Artificial Sequence
  Description of Artificial Sequence: Synthetic peptide
NQWHGFPRT

SEQ ID NO: 1041 - protein, 9 aa, Artificial Sequence
  Description of Artificial Sequence: Synthetic peptide
NQWHGKPRT

SEQ ID NO: 1042 - protein, 9 aa, Artificial Sequence
  Description of Artificial Sequence: Synthetic peptide
NQWHGNPRT

SEQ ID NO: 1043 - protein, 9 aa, Artificial Sequence
  Description of Artificial Sequence: Synthetic peptide
NQWHGRPRT

SEQ ID NO: 1044 - protein, 9 aa, Artificial Sequence
  Description of Artificial Sequence: Synthetic peptide
NQWHGSPRT

SEQ ID NO: 1045 - protein, 9 aa, Artificial Sequence
  Description of Artificial Sequence: Synthetic peptide
NQWHGTPRT

SEQ ID NO: 1046 - protein, 9 aa, Artificial Sequence
  Description of Artificial Sequence: Synthetic peptide
NQWNADPRT

SEQ ID NO: 1047 - protein, 9 aa, Artificial Sequence
  Description of Artificial Sequence: Synthetic peptide
NQWNAFPRT

SEQ ID NO: 1048 - protein, 9 aa, Artificial Sequence
  Description of Artificial Sequence: Synthetic peptide
NQWNAKPRT

SEQ ID NO: 1049 - protein, 9 aa, Artificial Sequence
  Description of Artificial Sequence: Synthetic peptide
NQWNANPRT

SEQ ID NO: 1050 - protein, 9 aa, Artificial Sequence
  Description of Artificial Sequence: Synthetic peptide
NQWNARPRT

SEQ ID NO: 1051 - protein, 9 aa, Artificial Sequence
  Description of Artificial Sequence: Synthetic peptide
NQWNASPRT

SEQ ID NO: 1052 - protein, 9 aa, Artificial Sequence
  Description of Artificial Sequence: Synthetic peptide
NQWNATPRT

SEQ ID NO: 1053 - protein, 9 aa, Artificial Sequence
  Description of Artificial Sequence: Synthetic peptide
NQWNGDPRT

SEQ ID NO: 1054 - protein, 9 aa, Artificial Sequence
  Description of Artificial Sequence: Synthetic peptide
NQWNGFPRT

SEQ ID NO: 1055 - protein, 9 aa, Artificial Sequence
  Description of Artificial Sequence: Synthetic peptide
NQWNGKPRT

SEQ ID NO: 1056 - protein, 9 aa, Artificial Sequence
  Description of Artificial Sequence: Synthetic peptide
NQWNGNPRT

SEQ ID NO: 1057 - protein, 9 aa, Artificial Sequence
  Description of Artificial Sequence: Synthetic peptide
NQWNGRPRT

SEQ ID NO: 1058 - protein, 9 aa, Artificial Sequence
  Description of Artificial Sequence: Synthetic peptide
NQWNGSPRT

SEQ ID NO: 1059 - protein, 9 aa, Artificial Sequence
  Description of Artificial Sequence: Synthetic peptide
NQWNGTPRT

SEQ ID NO: 1060 - protein, 9 aa, Artificial Sequence
  Description of Artificial Sequence: Synthetic peptide
NQWQADPRT

SEQ ID NO: 1061 - protein, 9 aa, Artificial Sequence
  Description of Artificial Sequence: Synthetic peptide
NQWQAFPRT

SEQ ID NO: 1062 - protein, 9 aa, Artificial Sequence
  Description of Artificial Sequence: Synthetic peptide
NQWQAKPRT

SEQ ID NO: 1063 - protein, 9 aa, Artificial Sequence
  Description of Artificial Sequence: Synthetic peptide
NQWQANPRT

SEQ ID NO: 1064 - protein, 9 aa, Artificial Sequence
  Description of Artificial Sequence: Synthetic peptide
NQWQARPRT

SEQ ID NO: 1065 - protein, 9 aa, Artificial Sequence
  Description of Artificial Sequence: Synthetic peptide
NQWQASPRT

SEQ ID NO: 1066 - protein, 9 aa, Artificial Sequence
  Description of Artificial Sequence: Synthetic peptide
NQWQATPRT

SEQ ID NO: 1067 - protein, 9 aa, Artificial Sequence
  Description of Artificial Sequence: Synthetic peptide
NQWQGDPRT

SEQ ID NO: 1068 - protein, 9 aa, Artificial Sequence
  Description of Artificial Sequence: Synthetic peptide
NQWQGFPRT

SEQ ID NO: 1069 - protein, 9 aa, Artificial Sequence
  Description of Artificial Sequence: Synthetic peptide
NQWQGKPRT

SEQ ID NO: 1070 - protein, 9 aa, Artificial Sequence
  Description of Artificial Sequence: Synthetic peptide
NQWQGNPRT

SEQ ID NO: 1071 - protein, 9 aa, Artificial Sequence
  Description of Artificial Sequence: Synthetic peptide
NQWQGRPRT

SEQ ID NO: 1072 - protein, 9 aa, Artificial Sequence
  Description of Artificial Sequence: Synthetic peptide
NQWQGSPRT

SEQ ID NO: 1073 - protein, 9 aa, Artificial Sequence
  Description of Artificial Sequence: Synthetic peptide
NQWQGTPRT

SEQ ID NO: 1074 - protein, 9 aa, Artificial Sequence
  Description of Artificial Sequence: Synthetic peptide
NQWSADPRT

SEQ ID NO: 1075 - protein, 9 aa, Artificial Sequence
  Description of Artificial Sequence: Synthetic peptide
NQWSAFPRT

SEQ ID NO: 1076 - protein, 9 aa, Artificial Sequence
  Description of Artificial Sequence: Synthetic peptide
NQWSAKPRT

SEQ ID NO: 1077 - protein, 9 aa, Artificial Sequence
  Description of Artificial Sequence: Synthetic peptide
NQWSANPRT

SEQ ID NO: 1078 - protein, 9 aa, Artificial Sequence
  Description of Artificial Sequence: Synthetic peptide
NQWSARPRT

SEQ ID NO: 1079 - protein, 9 aa, Artificial Sequence
  Description of Artificial Sequence: Synthetic peptide
NQWSASPRT

SEQ ID NO: 1080 - protein, 9 aa, Artificial Sequence
  Description of Artificial Sequence: Synthetic peptide
NQWSATPRT

SEQ ID NO: 1081 - protein, 9 aa, Artificial Sequence
  Description of Artificial Sequence: Synthetic peptide
NQWSGDPRT

SEQ ID NO: 1082 - protein, 9 aa, Artificial Sequence
  Description of Artificial Sequence: Synthetic peptide
NQWSGFPRT

SEQ ID NO: 1083 - protein, 9 aa, Artificial Sequence
  Description of Artificial Sequence: Synthetic peptide
NQWSGKPRT

SEQ ID NO: 1084 - protein, 9 aa, Artificial Sequence
  Description of Artificial Sequence: Synthetic peptide
NQWSGNPRT

SEQ ID NO: 1085 - protein, 9 aa, Artificial Sequence
  Description of Artificial Sequence: Synthetic peptide
NQWSGRPRT

SEQ ID NO: 1086 - protein, 9 aa, Artificial Sequence
  Description of Artificial Sequence: Synthetic peptide
NQWSGSPRT

SEQ ID NO: 1087 - protein, 9 aa, Artificial Sequence
  Description of Artificial Sequence: Synthetic peptide
NQWSGTPRT

SEQ ID NO: 1088 - protein, 9 aa, Artificial Sequence
  Description of Artificial Sequence: Synthetic peptide
  MOD_RES (1)..(1): Q or N
  MOD_RES (4)..(4): D, E, H, N, Q or S
  MOD_RES (5)..(5): A or G
  MOD_RES (6)..(6): D, F, K, N, R, S or T
XQWXXXPRT

SEQ ID NO: 1089 - protein, 9 aa, Artificial Sequence
  Description of Artificial Sequence: Synthetic peptide
  MOD_RES (1)..(1): H, N, Q or S
  MOD_RES (3)..(3): F, H, I, P, R, S, W or Y
  MOD_RES (4)..(4): D, E, H, N, Q, S or V
  MOD_RES (5)..(5): A, D, G, Q or S
  MOD_RES (6)..(6): D, F, H, K, L, M, N, Q, R, S or T
  MOD_RES (9)..(9): T or S
XQXXXXPRX

SEQ ID NO: 1090 - protein, 9 aa, Artificial Sequence
  Description of Artificial Sequence: Synthetic peptide
QQYYSTPFT

SEQ ID NO: 1091 - protein, 9 aa, Artificial Sequence
  Description of Artificial Sequence: Synthetic peptide
MQATQFPLT

SEQ ID NO: 1092 - protein, 9 aa, Artificial Sequence
  Description of Artificial Sequence: Synthetic peptide
QQRSNWPWT

SEQ ID NO: 1093 - protein, 9 aa, Artificial Sequence
  Description of Artificial Sequence: Synthetic peptide
QQFNSYPLT

SEQ ID NO: 1094 - protein, 8 aa, Artificial Sequence
  Description of Artificial Sequence: Synthetic peptide
HQWNNYGT

SEQ ID NO: 1095 - protein, 9 aa, Artificial Sequence
  Description of Artificial Sequence: Synthetic peptide
FQGSHVPLT

SEQ ID NO: 1096 - protein, 9 aa, Artificial Sequence
  Description of Artificial Sequence: Synthetic peptide
QQGQSYPYT

SEQ ID NO: 1097 - protein, 10 aa, Artificial Sequence
  Description of Artificial Sequence: Synthetic peptide
  MOD_RES (3)..(3): Y, W, or F
QSXDGTLSAL

SEQ ID NO: 1098 - protein, 9 aa, Artificial Sequence
  Description of Artificial Sequence: Synthetic peptide
QQSYSTPRT

SEQ ID NO: 1099 - protein, 8 aa, Artificial Sequence
  Description of Artificial Sequence: Synthetic peptide
QQYGSSPT

SEQ ID NO: 1100 - protein, 8 aa, Artificial Sequence
  Description of Artificial Sequence: Synthetic peptide
QQYHRSWT

SEQ ID NO: 1101 - protein, 9 aa, Artificial Sequence
  Description of Artificial Sequence: Synthetic peptide
FQGSHVPLT

SEQ ID NO: 1102-1199 - skipped (98 entries)

SEQ ID NO: 1200 - protein, 116 aa, Artificial Sequence
  Description of Artificial Sequence: Synthetic polypeptide
EVQLQQSGAELVKPGASVKLSCTASGFDIQDTYMHWVKQRPEQGLEWIGRIDPASGHTKYDPKFQVKATITTDTSSNTAYLQLSSLTSEDTAVYYCSRSGGLPDVWGAGTTVTVSS

SEQ ID NO: 1201 - protein, 116 aa, Artificial Sequence
  Description of Artificial Sequence: Synthetic polypeptide
QVHLQQSGPELVKPGASVKLSCKASGYTFTKYDINWVRQRPEQGLEWIGWIFPGDGRTDYNEKFKGKATLTTDKSSSTAYMEVSRLTSEDSAVYFCARYGPAMDYWGQGTSVTVAS

SEQ ID NO: 1202 - protein, 116 aa, Artificial Sequence
  Description of Artificial Sequence: Synthetic polypeptide
QVQLVQSGAEVKKPGASVKVSCKASGFDICDTYMHWVKQRPGQGLEWIGRIDPASGHTKYDPKFQVRATITTDTSTSTAYLELSSLRSEDTAVYYCARSGGLPDVWGQGTTVTVSS

SEQ ID NO: 1203 - protein, 116 aa, Artificial Sequence
  Description of Artificial Sequence: Synthetic polypeptide
QVQLVQSGAEVKKPGASVKLSCKASGFDICDTYMHWVRQRPGQGLEWIGRIDPASGHTKYDPKFQVRATMTTDTSTSTVYLELSSLRSEDTAVYYCARSGGLPDVWGQGTTVTVSS

SEQ ID NO: 1204 - protein, 116 aa, Artificial Sequence
  Description of Artificial Sequence: Synthetic polypeptide
QVQLVQSGAEVVKPGASVKLSCKASGFDICDTYMHWVRQRPGQGLEWMGRIDPASGHTKYDPKFQVRVTMTTDTSTSTVYLELSSLRSEDTAVYYCARSGGLPDVWGQGTTVTVSS

SEQ ID NO: 1205 - protein, 116 aa, Artificial Sequence
  Description of Artificial Sequence: Synthetic polypeptide
QVQLVQSGAEVKKPGASVKVSCKASGFDICDTYMHWVKQRPGQGLEWIGRIDPASGHTKYDPKFQVRATITRDTSTSTAYLELSSLRSEDTAVYYCSRSGGLPDVWGQGTTVTVSS

SEQ ID NO: 1206 - protein, 116 aa, Artificial Sequence
  Description of Artificial Sequence: Synthetic polypeptide
QVQLVQSGAEVKKPGASVKVSCKASGFDICDTYMHWVKQAPGQGLEWMGRIDPASGHTKYDPKFQVRATMTTDTSTSTAYLELSSLRSEDTAVYYCSRSGGLPDVWGQGTTVTVSS

SEQ ID NO: 1207 - protein, 116 aa, Artificial Sequence
  Description of Artificial Sequence: Synthetic polypeptide
QVQLVQSGAEVKKPGASVKLSCKASGFDIQDTYMHWVRQAPGQGLEWMGRIDPASGHTKYDPKFQVRVTMTTDTSTSTVYMELSSLRSEDTAVYYCSRSGGLPDVWGQGTTVTVSS

SEQ ID NO: 1208 - protein, 116 aa, Artificial Sequence
  Description of Artificial Sequence: Synthetic polypeptide
QVQLVQSGAEVKKPGASVKLSCKASGFDIQDTYMHWVRQAPGQGLEWMGRIDPASGHTKYDPKFQVRVTMTRDTSTSTVYMELSSLRSEDTAVYYCSRSGGLPDVWGQGTTVTVSS

SEQ ID NO: 1209 - protein, 116 aa, Artificial Sequence
  Description of Artificial Sequence: Synthetic polypeptide
QVQLVQSGAEVKKPGASVKVSCKASGFDIQDTYMHWVRQAPGQGLEWMGRIDPASGHTKYDPKFQVRVTMTRDTSTSTVYMELSSLRSEDTAVYYCARSGGLPDVWGQGTTVTVSS

SEQ ID NO: 1210 - protein, 116 aa, Artificial Sequence
  Description of Artificial Sequence: Synthetic polypeptide
QVQLVQSGAEVKKPGASVKVSCKASGFDIQDTYMHWVRQAPGQGLEWMGRIDPASGHTKYDPKFQVRVTMTRDTSTSTVYMELSSLRSEDTAVYYCARSGGLPDKWGQGTTVTVSS

SEQ ID NO: 1211 - protein, 116 aa, Artificial Sequence
  Description of Artificial Sequence: Synthetic polypeptide
QVQLVQSGAEVKKPGASVKVSCKASGFDIQDTYMHWVRQAPGQGLEWMGRIDPASGHTKYDPKFQVRVTMTRDTSTSTVYMELSSLRSEDTAVYYCARSGGLPDMWGQGTTVTVSS

SEQ ID NO: 1212 - protein, 116 aa, Artificial Sequence
  Description of Artificial Sequence: Synthetic polypeptide
QVQLVQSGAEVKKPGASVKVSCKASGFDIQDTYMHWVRQAPGQGLEWMGRIDPASGHTKYDPKFQVRVTMTRDTSTSTVYMELSSLRSEDTAVYYCARSGGLPDQWGQGTTVTVSS

SEQ ID NO: 1213 - protein, 116 aa, Artificial Sequence
  Description of Artificial Sequence: Synthetic polypeptide
QVQLVQSGAEVKKPGASVKVSCKASGFDIQDTYMHWVRQAPGQGLEWMGRIDPASGHTKYDPKFQVRVTMTRDTSTSTVYMELSSLRSEDTAVYYCARSGGLPDWWGQGTTVTVSS

SEQ ID NO: 1214 - protein, 116 aa, Artificial Sequence
  Description of Artificial Sequence: Synthetic polypeptide
  MOD_RES (28)..(28): D or E
  MOD_RES (29)..(29): I, P or V
  MOD_RES (30)..(30): G, Q, S or V
  MOD_RES (33)..(33): F or Y
  MOD_RES (34)..(34): I or M
  MOD_RES (102)..(102): L or M
  MOD_RES (105)..(105): E, I, K, L, M, Q, T, V, W or Y
QVQLVQSGAEVKKPGASVKVSCKASGFXXXDTXXHWVRQAPGQGLEWMGRIDPASGHTKYDPKFQVRVTMTRDTSTSTVYMELSSLRSEDTAVYYCARSGGXPDXWGQGTTVTVSS

SEQ ID NO: 1215 - protein, 116 aa, Artificial Sequence
  Description of Artificial Sequence: Synthetic polypeptide
  MOD_RES (28)..(28): D or E
  MOD_RES (29)..(29): I, P or V
  MOD_RES (30)..(30): G, Q, S or V
  MOD_RES (33)..(33): F or Y
  MOD_RES (34)..(34): I or M
  MOD_RES (102)..(102): L or M
  MOD_RES (105)..(105): E, I, K, L, M, Q, T, V, W or Y
QVQLVQSGAEVKKPGASVKVSCKASGFXXXDTXXHWVRQAPGQGLEWMGRIDPASGHTKYDPKFQVRVTMTRDTSTSTVYMELSSLRSEDTAVYYCSRSGGXPDXWGQGTTVTVSS

SEQ ID NO: 1216 - protein, 116 aa, Artificial Sequence
  Description of Artificial Sequence: Synthetic polypeptide
QVQLVQSGAEVKKPGASVKVSCKASGFDIQDTYMHWVRQAPGQGLEWMGRIEPASGHIKYSPKFQGRVTMTRDTSTSTVYMELSSLRSEDTAVYYCARSGGLPDWWGQGTTVTVSS

SEQ ID NO: 1217 - protein, 116 aa, Artificial Sequence
  Description of Artificial Sequence: Synthetic polypeptide
QVQLVQSGAEVKKPGASVKVSCKASGFDIQDTYMHWVRQAPGQGLEWMGRIEPASGHVKYSPKFQVRVTMTRDTSTSTVYMELSSLRSEDTAVYYCARSGGLPDWWGQGTTVTVSS

SEQ ID NO: 1218 - protein, 116 aa, Artificial Sequence
  Description of Artificial Sequence: Synthetic polypeptide
QVQLVQSGAEVKKPGASVKVSCKASGFDIQDTYMHWVRQAPGQGLEWMGRIEPASGHVKYDPKFQTRVTMTRDTSTSTVYMELSSLRSEDTAVYYCARSGGLPDWWGQGTTVTVSS

SEQ ID NO: 1219 - protein, 116 aa, Artificial Sequence
  Description of Artificial Sequence: Synthetic polypeptide
QVQLVQSGAEVKKPGASVKVSCKASGFDIQDTYMHWVRQAPGQGLEWMGRIDPASGHIKYDPKFQKRVTMTRDTSTSTVYMELSSLRSEDTAVYYCARSGGLPDMWGQGTTVTVSS

SEQ ID NO: 1220 - protein, 116 aa, Artificial Sequence
  Description of Artificial Sequence: Synthetic polypeptide
QVQLVQSGAEVKKPGASVKVSCKASGFDIQDTYMHWVRQAPGQGLEWMGRIDPASGHVKIDPKFQVRVTMTRDTSTSTVYMELSSLRSEDTAVYYCARSGGLPDMWGQGTTVTVSS

SEQ ID NO: 1221 - protein, 116 aa, Artificial Sequence
  Description of Artificial Sequence: Synthetic polypeptide
QVQLVQSGAEVKKPGASVKVSCKASGFDIQDTYMHWVRQAPGQGLEWMGRIDPASGHLKYDPKFQVRVTMTRDTSTSTVYMELSSLRSEDTAVYYCARSGGLPDMWGQGTTVTVSS

SEQ ID NO: 1222 - protein, 116 aa, Artificial Sequence
  Description of Artificial Sequence: Synthetic polypeptide
QVQLVQSGAEVKKPGASVKVSCKASGFDIQDTYMHWVRQAPGQGLEWMGRIDPASGHLKYDPKFQRRVTMTRDTSTSTVYMELSSLRSEDTAVYYCARSGGLPDMWGQGTTVTVSS

SEQ ID NO: 1223 - protein, 116 aa, Artificial Sequence
  Description of Artificial Sequence: Synthetic polypeptide
QVQLVQSGAEVKKPGASVKVSCKASGFDIQDTYMHWVRQAPGQGLEWMGRIDPASGHLKYDPKFQNRVTMTRDTSTSTVYMELSSLRSEDTAVYYCARSGGLPDKWGQGTTVTVSS

SEQ ID NO: 1224 - protein, 116 aa, Artificial Sequence
  Description of Artificial Sequence: Synthetic polypeptide
QVQLVQSGAEVKKPGASVKVSCKASGFDIQDTYMHWVRQAPGQGLEWMGRIEPASGHLKYDPKFQERVTMTRDTSTSTVYMELSSLRSEDTAVYYCARSGGLPDKWGQGTTVTVSS

SEQ ID NO: 1225 - protein, 116 aa, Artificial Sequence
  Description of Artificial Sequence: Synthetic polypeptide
QVQLVQSGAEVKKPGASVKVSCKASGFDIQDTYMHWVRQAPGQGLEWMGRIDPASGHLKYDPKFQGRVTITRDTSASTAYMELSSLRSEDTAVYYCARSGGLPDMWGQGTTVTVSS

SEQ ID NO: 1226 - protein, 116 aa, Artificial Sequence
  Description of Artificial Sequence: Synthetic polypeptide
QVQLVQSGAEVKKPGASVKVSCKASGFDIQDTYMHWVRQAPGQGLEWMGRIDPASGHLKYDPKFQGRVTITRDTSASTVYMELSSLRSEDTAVYYCARSGGLPDMWGQGTTVTVSS

SEQ ID NO: 1227 - protein, 116 aa, Artificial Sequence
  Description of Artificial Sequence: Synthetic polypeptide
QVQLVQSGAEVKKPGASVKVSCKASGFDIQDTYMHWVRQAPGQGLEWMGRIDPASGHTKYDPKFQGRATITTDTSASTAYLQLSSLRSEDTAVYYCARSGGLPDVWGQGTTVTVSS

SEQ ID NO: 1228 - protein, 116 aa, Artificial Sequence
  Description of Artificial Sequence: Synthetic polypeptide
QVQLVQSGAEVKKPGASVKVSCKASGFDIQDTYMHWVRQAPGQGLEWMGRIDPASGHTKYDPKFQVRATITTDTSASTAYLQLSSLRSEDTAVYYCARSGGLPDFWGQGTTVTVSS

SEQ ID NO: 1229 - protein, 116 aa, Artificial Sequence
  Description of Artificial Sequence: Synthetic polypeptide
QVQLVQSGAEVKKPGASVKVSCKASGFDIQDTYMHWVRQAPGQGLEWMGRIDPASGHTKYDPKFQGRATITTDTSASTAYLQLSSLRSEDTAVYYCARSGGLPDFWGQGTTVTVSS

SEQ ID NO: 1230 - protein, 116 aa, Artificial Sequence
  Description of Artificial Sequence: Synthetic polypeptide
QVQLVQSGAEVKKPGASVKVSCKASGFDIQDTYMHWVRQAPGQGLEWMGRIDPASGHTKYDPKFQGRATITTDTSASTAYLQLSSLRSEDTAVYYCARSGGLPDLWGQGTTVTVSS

SEQ ID NO: 1231 - protein, 116 aa, Artificial Sequence
  Description of Artificial Sequence: Synthetic polypeptide
QVQLVQSGAEVKKPGASVKVSCKASGFDIQDTYMHWVRQAPGQGLEWMGRIDPASGHSKYDPKFQVRATITTDTSASTAYLQLSSLRSEDTAVYYCARSGGLPDFWGQGTTVTVSS

SEQ ID NO: 1232 - protein, 116 aa, Artificial Sequence
  Description of Artificial Sequence: Synthetic polypeptide
QVQLVQSGAEVKKPGASVKVSCKASGFDIQDTYMHWVRQAPGQGLEWMGRIDPASGHYKYDPKFQVRATITTDTSASTAYLQLSSLRSEDTAVYYCARSGGLPDFWGQGTTVTVSS

SEQ ID NO: 1233 - protein, 122 aa, Artificial Sequence
  Description of Artificial Sequence: Synthetic polypeptide
EVQLVESGGGLVQPGGSLRLSCAVSGFTFSSYWMSWVRQAPGKGLEWVANIKEDGSEKNYVDSVKGRFTLSSDNAKNSLYLQMNSLRAEDTAVYYCAREDYDSYYKYGMDVWGQGTAVIVSS

SEQ ID NO: 1234 - protein, 119 aa, Artificial Sequence
  Description of Artificial Sequence: Synthetic polypeptide
QVQLQQWGAGLLKPSETLSLTCAVYGGSFTGFYWSWIRQPPGKGLEWIGEINHRGNTNYNPSLKSRVTMSVDTSKNQFSLNMISVTAADTAMYFCASPFYDFWSGSDYWGQGTLVTVSS

SEQ ID NO: 1235 - protein, 124 aa, Artificial Sequence
  Description of Artificial Sequence: Synthetic polypeptide
QVQLVQSGAEVKKPGASVKVSCKASGYDFTYYGISWVRQAPGQGLEWMGWISTYNGNTHYARMLQGRVTMTTDTSTRTAYMELRSLRSDDTAVYYCARENYYGSGAYRGGMDVWGQGTTVTVSS

SEQ ID NO: 1236 - protein, 453 aa, Artificial Sequence
  Description of Artificial Sequence: Synthetic polypeptide
QVQLVQSGAEVKKPGASVKVSCKASGYDFTYYGISWVRQAPGQGLEWMGWISTYNGNTHYARMLQGRVTMTTDTSTRTAYMELRSLRSDDTAVYYCARENYYGSGAYRGGMDVWGQGTTVTVSSASTKGPSVFPLAPSSKSTSGGTAALGCLVKDYFPEPVTVSWNSGALTSGVHTFPAVLQSSGLYSLSSVVTVPSSSLGTQTYICNVNHKPSNTKVDKKVEPKSCDKTHTCPPCPAPEAAGAPSVFLFPPKPKDTLMISRTPEVTCVVVDVSHEDPEVKFNWYVDGVEVHNAKTKPREEQYNSTYRVVSVLTVLHQDWLNGKEYKCKVSNKALPAPIEKTISKAKGQPREPQVYTLPPSREEMTKNQVSLTCLVKGFYPSDIAVEWESNGQPENNYKTTPPVLDSDGSFFLYSKLTVDKSRWQQGNVFSCSVMHEALHNHYTQKSLSLSPG

SEQ ID NO: 1237 - protein, 121 aa, Artificial Sequence
  Description of Artificial Sequence: Synthetic polypeptide
QLQLQESGPGLVKPSETLSLTCTVSGGSISSRSYYWGWIRQPPGKGLEWIGSIYYNGRTYYNPSLKSRVTISVDTSKNQFSLKLSSVTAADTAVYYCAREDYGDYGAFDIWGQGTMVTVSS

SEQ ID NO: 1238 - protein, 124 aa, Artificial Sequence
  Description of Artificial Sequence: Synthetic polypeptide
QVTLKESGPALVKPTQTLTLTCTFSGFSLSTSNMGVVWIRQPPGKALEWLAHILWDDREYSNPALKSRLTISKDTSKNQVVLTMTNMDPVDTATYYCARMSRNYYGSSYVMDYWGQGTLVTVSS

SEQ ID NO: 1239 - protein, 119 aa, Artificial Sequence
  Description of Artificial Sequence: Synthetic polypeptide
QVQLVQSGSELKKPGASVKVSCKASGYTFTLYGMNWVRQAPGQGLEWMGWINTYTGEPTYADDFKGRFVFSLDTSVSTAYLQISSLKAEDTAVYYCARDTAMDYAMAYWGQGTLVTVSS

SEQ ID NO: 1240 - protein, 119 aa, Artificial Sequence
  Description of Artificial Sequence: Synthetic polypeptide
QVQLVQSGSELKKPGASVKVSCKASGYTFTLYGMNWVKQAPGKGLKWMGWINTYTGEPTYADDFKGRFVFSLDTSVSTAYLQISSLKAEDTAVYFCARDTAMDYAMAYWGQGTLVTVSS

SEQ ID NO: 1241 - protein, 122 aa, Artificial Sequence
  Description of Artificial Sequence: Synthetic polypeptide
QVQLVQSGSELKKPGASVKVSCKASGYTFTNYGMNWVRQAPGQGLEWMGWINTYTGEPTYADDFKGRFVFSLDTSVSTAYLQISSLKAEDTAVYYCARDYGKYGDYYAMDYWGQGTLVTVSS

SEQ ID NO: 1242 - protein, 122 aa, Artificial Sequence
  Description of Artificial Sequence: Synthetic polypeptide
QVQLVQSGSELKKPGASVKVSCKASGYTFTNYGMNWVRQAPGKGLKWMGWINTYTGEPTYADDFKGRFVFSLDTSVSTAYLQISSLKAEDTAVYFCARDYGKYGDYYAMDYWGQGTLVTVSS

SEQ ID NO: 1243 - protein, 119 aa, Artificial Sequence
  Description of Artificial Sequence: Synthetic polypeptide
QVQLQQPGSVLVRPGASVKVSCKASGYTFTSSWMHWAKQRPGQGLEWIGEIHPNSGGTNYNEKFKGKATVDTSSSTAYVDLSSLTSEDSAVYYCARGDYYGYVSWFAYWGQGTLVTVSS

SEQ ID NO: 1244 - protein, 121 aa, Artificial Sequence
  Description of Artificial Sequence: Synthetic polypeptide
QVQLVQSGAEVKKPGASVKVSCKASGYTFTSSWMHWARQAPGQGLEWIGEIHPNSGGTNYAQKFQGRATLTVDTSSSTAYMELSRLRSDDTAVYYCARGDYYGYVSWFAYWGQGTLVTVSS

SEQ ID NO: 1245 - protein, 121 aa, Artificial Sequence
  Description of Artificial Sequence: Synthetic polypeptide
QVQLVQSGAEVKKPGASVKVSCKASGYTFTSSWMHWARQAPGQGLEWIGEIHPNSGGTNYAQKFQGRATMTVDTSISTAYMELSRLRSDDTAVYYCARGDYYGYVSWFAYWGQGTLVTVSS

SEQ ID NO: 1246 - protein, 121 aa, Artificial Sequence
  Description of Artificial Sequence: Synthetic polypeptide
QVQLVQSGAEVKKPGASVKVSCKASGYTFTSSWMHWARQAPGQGLEWIGEIHPNSGGTNYAQKFQGRVTMTVDTSISTAYMELSRLRSDDTAVYYCARGDYYGYVSWFAYWGQGTLVTVSS

SEQ ID NO: 1247 - protein, 121 aa, Artificial Sequence
  Description of Artificial Sequence: Synthetic polypeptide
QVQLVQSGAEVKKPGASVKVSCKASGYTFTSSWMHWARQAPGQGLEWMGEIHPNSGGTNYAQKFQGRVTMTVDTSISTAYMELSRLRSDDTAVYYCARGDYYGYVSWFAYWGQGTLVTVSS

SEQ ID NO: 1248 - protein, 119 aa, Artificial Sequence
  Description of Artificial Sequence: Synthetic polypeptide
QVQLVQSGAEVKKPGASVKVSCKASGYTFTSYDINWVRQAPGQGLEWMGWLNPNSGNTGYAQKFQGRVTMTADRSTSTAYMELSSLRSEDTAVYYCAREVPETAAFEYWGQGTLVTVSS

SEQ ID NO: 1249 - protein, 119 aa, Artificial Sequence; identical to SEQ ID NO: 1248
  Description of Artificial Sequence: Synthetic polypeptide

SEQ ID NO: 1250 - protein, 119 aa, Artificial Sequence
  Description of Artificial Sequence: Synthetic polypeptide
QVQLVQSGAEVKKPGASVKVSCKASGYTFTSYDINWVRQAPGQGLEWMGWLNPNSGYTGYAQKFQGRVTMTADRSTSTAYMELSSLRSEDTAVYYCAREVPETAAFEYWGQGTLVTVSS

SEQ ID NO: 1251 - protein, 119 aa, Artificial Sequence; identical to SEQ ID NO: 1248
  Description of Artificial Sequence: Synthetic polypeptide

SEQ ID NO: 1252 - protein, 119 aa, Artificial Sequence; identical to SEQ ID NO: 1248
  Description of Artificial Sequence: Synthetic polypeptide

SEQ ID NO: 1253 - protein, 119 aa, Artificial Sequence; identical to SEQ ID NO: 1248
  Description of Artificial Sequence: Synthetic polypeptide

SEQ ID NO: 1254 - protein, 119 aa, Artificial Sequence; identical to SEQ ID NO: 1248
  Description of Artificial Sequence: Synthetic polypeptide

SEQ ID NO: 1255 - protein, 119 aa, Artificial Sequence; identical to SEQ ID NO: 1250
  Description of Artificial Sequence: Synthetic polypeptide

SEQ ID NO: 1256 - protein, 119 aa, Artificial Sequence; identical to SEQ ID NO: 1250
  Description of Artificial Sequence: Synthetic polypeptide

SEQ ID NO: 1257 - protein, 119 aa, Artificial Sequence; identical to SEQ ID NO: 1250
  Description of Artificial Sequence: Synthetic polypeptide

SEQ ID NO: 1258 - protein, 119 aa, Artificial Sequence; identical to SEQ ID NO: 1250
  Description of Artificial Sequence: Synthetic polypeptide

SEQ ID NO: 1259 - protein, 119 aa, Artificial Sequence; identical to SEQ ID NO: 1250
  Description of Artificial Sequence: Synthetic polypeptide

SEQ ID NO: 1260 - protein, 118 aa, Artificial Sequence
  Description of Artificial Sequence: Synthetic polypeptide
QVQLQESGPGLVKPSETLSLTCTVSGGSISSYFWSWIRQPPGKGLEWIGYIYYSGNTKYNPSLKSRVTISIDTSKNQFSLKLSSVTAADTAVYYCARETGSYYGFDYWGQGTLVTVSS

SEQ ID NO: 1261 - protein, 120 aa, Artificial Sequence
  Description of Artificial Sequence: Synthetic polypeptide
QVQLQQWGAGLLKPSETLSLTCAVHGGSFSGYYWNWIRQPPGKGLEWIGEINHAGNTNYNPSLKSRVTISLDTSKNQFSLTLTSVTAADTAVYYCARGYCRSTTCYFDYWGQGTLVTVSS

SEQ ID NO: 1262 - protein, 121 aa, Artificial Sequence
  Description of Artificial Sequence: Synthetic polypeptide
EVQLLESGGGLVQPGKSLRLSCAVSGFTFSTYGMNWVRQAPGKGLEWVSSISGTGRTTYHADSVQGRFTVSRDNSKNILYLQMNSLRADDTAVYFCTKERGDYYYGVFDYWGQGTLVTVSS

SEQ ID NO: 1263 - protein, 122 aa, Artificial Sequence
  Description of Artificial Sequence: Synthetic polypeptide
QIQLVQSGPELKKPGETVKISCKASGYTFTTYGMSWVKQAPGKGLKWMGWMNTYSGVTTYADDFKGRFAFSLETSASTAYMQIDNLKNEDTATYFCAREGYVFDDYYATDYWGQGTSVTVSS

SEQ ID NO: 1264 - protein, 106 aa, Artificial Sequence
  Description of Artificial Sequence: Synthetic polypeptide
QIVLSQSPAILSASPGEKVTMTCRASSSVSYMYWYQQKPGSSPKPWIYATSNLASGVPDRFSGSGSGTSYSLTISRVEAEDAATYYCQQWSGNPRTFGGGTKLEIK

SEQ ID NO: 1265 - protein, 131 aa, Artificial Sequence
  Description of Artificial Sequence: Synthetic polypeptide
MKLPVRLLVLMFWIPASSSDVLMTQTPLSLPVSLGDQASISCRSSQTIVHSNGDTYLDWFLQKPGQSPKLLIYKVSNRFSGVPDRFSGSGSGTDFTLKISRVEAEDLGVYYCFQGSHVPYTFGGGTKLEIK

SEQ ID NO: 1266 - protein, 106 aa, Artificial Sequence
  Description of Artificial Sequence: Synthetic polypeptide
EIVLTQSPGTLSLSPGERATMSCRASSSVSYMYWYQQKPGQAPRPWIYATSNLASGIPDRFSGSGSGTDFTLTISRVEPEDFAVYYCQQWSGNPRTFGGGTKLEIK

SEQ ID NO: 1267 - protein, 106 aa, Artificial Sequence
  Description of Artificial Sequence: Synthetic polypeptide
EIVLTQSPGTLSLSPGERVTMSCRASSSVSYMYWYQQKPGQAPRPWIYATSNLASGVPDRFSGSGSGTDFTLTISRVEPEDFAVYYCQQWSGNPRTFGGGTKVEIK

SEQ ID NO: 1268 - protein, 106 aa, Artificial Sequence
  Description of Artificial Sequence: Synthetic polypeptide
EIVLTQSPGTLSASPGERVTLSCRASSSVSYMYWYQQKPGQAPRPWIYATSNLASGVPDRFSGSGSGTDFTLTISRLEPEDFAVYYCQQWSGNPRTFGGGTKLEIK

SEQ ID NO: 1269 - protein, 106 aa, Artificial Sequence
  Description of Artificial Sequence: Synthetic polypeptide
EIVLTQSPGTLSASPGERVTMSCRASSSVSYMYWYQQKPGQAPRLLIYATSNLASGVPDRFSGSGSGTDFTLTISRVEPEDFAVYYCQQWSGNPRTFGGGTKLEIK

SEQ ID NO: 1270 - protein, 106 aa, Artificial Sequence
  Description of Artificial Sequence: Synthetic polypeptide
EIVLTQSPGTLSLSPGERVTMSCRASSSVSYMYWYQQKPGQAPRPWIYATSNLASGVPDRFSGSGSGTDYTLTISRLEPEDFAVYYCQQWSGNPRTFGGGTKLEIK

SEQ ID NO: 1271 - protein, 106 aa, Artificial Sequence
  Description of Artificial Sequence: Synthetic polypeptide
EIVLTQSPGTLSLSPGERATLSCRASSSVSYMYWYQQKPGQAPRLLIYATSNLASGVPDRFSGSGSGTDYTLTISRLEPEDFAVYYCQQWSGNPRTFGGGTKLEIK

SEQ ID NO: 1272 - protein, 106 aa, Artificial Sequence
  Description of Artificial Sequence: Synthetic polypeptide
EIVLTQSPGTLSLSPGERATLSCRASSSVSYMYWYQQKPGQAPRLLIYATSNLASGIPDRFSGSGSGTDFTLTISRLEPEDFAVYYCQQWDGNPRTFGGGTKLEIK

SEQ ID NO: 1273 - protein, 106 aa, Artificial Sequence
  Description of Artificial Sequence: Synthetic polypeptide
EIVLTQSPGTLSLSPGERATLSCRASSSVSYMYWYQQKPGQAPRLLIYATSNLASGIPDRFSGSGSGTDFTLTISRLEPEDFAVYYCQQWHGNPRTFGGGTKLEIK

SEQ ID NO: 1274 - protein, 106 aa, Artificial Sequence
  Description of Artificial Sequence: Synthetic polypeptide
EIVLTQSPGTLSLSPGERATLSCRASSSVSYMYWYQQKPGQAPRLLIYATSNLASGIPDRFSGSGSGTDFTLTISRLEPEDFAVYYCQQWNGNPRTFGGGTKLEIK

SEQ ID NO: 1275 - protein, 106 aa, Artificial Sequence
  Description of Artificial Sequence: Synthetic polypeptide
EIVLTQSPGTLSLSPGERATLSCRASSSVSYMYWYQQKPGQAPRLLIYATSNLASGIPDRFSGSGSGTDFTLTISRLEPEDFAVYYCQQWQGNPRTFGGGTKLEIK

SEQ ID NO: 1276 - protein, 106 aa, Artificial Sequence
  Description of Artificial Sequence: Synthetic polypeptide
  MOD_RES (88)..(88): Q or N
  MOD_RES (91)..(91): D, E, H, N, Q or S
  MOD_RES (92)..(92): A or G
  MOD_RES (93)..(93): D, F, K, N, R, S or T
EIVLTQSPGTLSLSPGERATLSCRASSSVSYMYWYQQKPGQAPRLLIYATSNLASGIPDRFSGSGSGTDFTLTISRLEPEDFAVYYCXQWXXXPRTFGGGTKLEIK

SEQ ID NO: 1277 - protein, 106 aa, Artificial Sequence
  Description of Artificial Sequence: Synthetic polypeptide
EIVLTQSPGTLSLSPGERATLSCGASSSVSYMYWYQQKPGQAPRLLIYATSNLASGIPDRFSGSGSGTDFTLTISRLEPEDFAVYYCQQWEGNPRTFGGGTKLEIK

SEQ ID NO: 1278 - protein, 106 aa, Artificial Sequence
  Description of Artificial Sequence: Synthetic polypeptide
EIVLTQSPGTLSLSPGERATLSCRASSSVSYMYWYQQKPGQAPRLLIYATSNLASGIPDRFSGSGSGTDFTLTISRLEPEDFAVYYCSQWSGNPRTFGGGTKLEIK

SEQ ID NO: 1279 - protein, 106 aa, Artificial Sequence
  Description of Artificial Sequence: Synthetic polypeptide
EIVLTQSPGTLSLSPGERATLSCRASSSVSYMYWYQQKPGQAPRLLIYATSNLASGIPDRFSGSGSGTDFTLTISRLEPEDFAVYYCQQWSGNPRSFGGGTKLEIK

SEQ ID NO: 1280 - protein, 113 aa, Artificial Sequence
  Description of Artificial Sequence: Synthetic polypeptide
DIVMTQSPDSLAVSLGERATINCKSSQSILYSSNNKNYLAWYQQKPGQPPKLLIYWASTRESGVPDRFSGSGSGTDFTLTISSLQAEDVSVYYCQQYYSTPFTFGPGTKVDIK

SEQ ID NO: 1281 - protein, 112 aa, Artificial Sequence
  Description of Artificial Sequence: Synthetic polypeptide
DIMLTQTPLTSPVTLGQPASISCKSSQSLVHSDGNTYLSWLQQRPGQPPRLLFYKISNRFSGVPDRFSGSGAGTDFTLKISRVEAEDVGVYYCMQATQFPLTFGGGTKVEIK

SEQ ID NO: 1282 - protein, 107 aa, Artificial Sequence
  Description of Artificial Sequence: Synthetic polypeptide
EIVLTQSPATLSLSPGERATLSCRASQSVSSYLAWYQQKPGQAPRLLIYDASNRATGIPARFSGSGSGTDFTLTISSLEPEDFAVYYCQQRSNWPWTFGQGTKVEIK

SEQ ID NO: 1283 - protein, 214 aa, Artificial Sequence
  Description of Artificial Sequence: Synthetic polypeptide
EIVLTQSPATLSLSPGERATLSCRASQSVSSYLAWYQQKPGQAPRLLIYDASNRATGIPARFSGSGSGTDFTLTISSLEPEDFAVYYCQQRSNWPWTFGQGTKVEIKRTVAAPSVFIFPPSDEQLKSGTASVVCLLNNFYPREAKVQWKVDNALQSGNSQESVTEQDSKDSTYSLSSTLTLSKADYEKHKVYACEVTHQGLSSPVTKSFNRGEC

SEQ ID NO: 1284 - protein, 107 aa, Artificial Sequence [sequence omitted]

SEQ ID NO: 1285 - protein, 106 aa, Artificial Sequence
  Description of Artificial Sequence: Synthetic polypeptide
DIQLTQSPSFLSASVGDRVTITCSASSSVNYMHWYQQKPGKAPKLLIYSTSNLASGVPSRFSGSGSGTEFTLTISSLQPEDFATYYCHQWNNYGTFGQGTKVEIKR

SEQ ID NO: 1286 - protein, 113 aa, Artificial Sequence
  Description of Artificial Sequence: Synthetic polypeptide
DVVMTQSPLSLPVTLGQPASISCKSSQNIVHSDGNTYLEWFQQRPGQSPRRLIYKVSNRFSGVPDRFSGSGSGTDFTLKISRVEAEDVGVYYCFQGSHVPLTFGGGTKVEIKR

SEQ ID NO: 1287 - protein, 113 aa, Artificial Sequence
  Description of Artificial Sequence: Synthetic polypeptide
DVVMTQSPLSLPVTLGQPASISCKSSQNIVHSDGNTYLEWFQQRPGQSPRRLIYKVSNRFSGVPDRFSGSGSGTDFTLKISRVEAEDVGVYYCFQGSHVPLTFGQGTKVEIKR

SEQ ID NO: 1288 - protein, 113 aa, Artificial Sequence
  Description of Artificial Sequence: Synthetic polypeptide
DVVMTQTPLSLPVTPGEPASISCKSSQNIVHSDGNTYLEWYLQKPGQSPQLLIYKVSNRFSGVPDRFSGSGSGTDFTLKISRVEAEDLGVYYCFQGSHVPLTFGGGTKVEIKR

SEQ ID NO: 1289 - protein, 113 aa, Artificial Sequence
  Description of Artificial Sequence: Synthetic polypeptide
DVVMTQTPLSLPVSLGDQASISCKSSQNIVHSDGNTYLEWYLQKPGQSPKVLIYKVSNRFSGVPDRFSGSGSGTDFTLKISRVEAEDLGVYYCFQGSHVPLTFGGGTKVEIKR

SEQ ID NO: 1290 - protein, 113 aa, Artificial Sequence
  Description of Artificial Sequence: Synthetic polypeptide
DVVMTQSPLSLPVTLGQPASISCRSSQSIVHSNGNTYLDWFQQRPGQSPRRLIYKVSNRFSGVPDRFSGSGSGTDFTLKISRVEAEDVGVYYCFQGSHVPLTFGGGTKVEIKR

SEQ ID NO: 1291 - protein, 113 aa, Artificial Sequence
  Description of Artificial Sequence: Synthetic polypeptide
DVVMTQSPLSLPVTLGQPASISCRSSQSIVHSNGNTYLDWFQQRPGQSPRRLIYKVSNRFSGVPDRFSGSGSGTDFTLKISRVEAEDVGVYYCFQGSHVPLTFGQGTKVEIKR

SEQ ID NO: 1292 - protein, 113 aa, Artificial Sequence
  Description of Artificial Sequence: Synthetic polypeptide
DVVMTQTPLSLPVTPGEPASISCRSSQSIVHSNGNTYLDWYLQKPGQSPQLLIYKVSNRFSGVPDRFSGSGSGTDFTLKISRVEAEDLGVYYCFQGSHVPLTFGGGTKVEIKR

SEQ ID NO: 1293 - protein, 113 aa, Artificial Sequence
  Description of Artificial Sequence: Synthetic polypeptide
DVVMTQTPLSLPVSLGDQASISCRSSQSIVHSNGNTYLDWYLQKPGQSPKVLIYKVSNRFSGVPDRFSGSGSGTDFTLKINRVEAEDLGVYFCFQGSHVPLTFGGGTKLEIKR

SEQ ID NO: 1294 - protein, 107 aa, Artificial Sequence
  Description of Artificial Sequence: Synthetic polypeptide
DIQMNQSPSSLSASLGDTITITCHASQNINVLLSWYQQKPGNIPKLLIYKASNLHTGVPSRFSGSGSGTGFTFTISSLQPEDIATYYCQQGQSYPYTFGGGTKLEIK

SEQ ID NO: 1295 - protein, 107 aa, Artificial Sequence
  Description of Artificial Sequence: Synthetic polypeptide
DIQMTQSPSSLSASVGDRVTITCQASQDISNYLNWYQQKPGKAPKLLIYDASNLETGVPSRFSGSGSGTDFTFTISSLQPEDIATYYCQQYDNLPYTFGQGTKLEIK

SEQ ID NO: 1296 - protein, 107 aa, Artificial Sequence
  Description of Artificial Sequence: Synthetic polypeptide
DIQMTQSPSSLSASVGDRVTITCQASQNINVLLNWYQQKPGKAPKLLIYKASNLHTGVPSRFSGSGSGTDFTFTISSLQPEDIATYYCQQGQSYPYTFGQGTKLEIK

SEQ ID NO: 1297 - protein, 107 aa, Artificial Sequence
  Description of Artificial Sequence: Synthetic polypeptide
DIQMNQSPSSLSASVGDRVTITCQASQNINVLLSWYQQKPGKAPKLLIYKASNLHTGVPSRFSGSGSGTDFTFTISSLQPEDIATYYCQQGQSYPYTFGQGTKLEIK

SEQ ID NO: 1298 - protein, 111 aa, Artificial Sequence
  Description of Artificial Sequence: Synthetic polypeptide
  MOD_RES (32)..(32): Any amino acid
  MOD_RES (33)..(33): Any amino acid
  MOD_RES (36)..(36): Any amino acid
  MOD_RES (93)..(93): Any amino acid
QSVLTQPPSVSGAPGQRVTISCTSSSSDIGAXXGVXWYQQLPGTAPKLLIEGYYNRPSGVPDRFSGSKSGTSASLTITGLLPEDEGDYYCQSXDGTLSALFGGGTKLTVLG

SEQ ID NO: 1299 - protein, 111 aa, Artificial Sequence
  Description of Artificial Sequence: Synthetic polypeptide
QSVLTQPPSVSGAPGQRVTISCTSSSSDIGAGLGVHWYQQLPGTAPKLLIEGYYNRPSGVPDRFSGSKSGTSASLTITGLLPEDEGDYYCQSWDGTLSALFGGGTKLTVLG

SEQ ID NO: 1300 - protein, 111 aa, Artificial Sequence
  Description of Artificial Sequence: Synthetic polypeptide
QSVLTQPPSVSGAPGQRVTISCTSSSSDIGAGLGVHWYQQLPGTAPKLLIEGYYNRPSGVPDRFSGSKSGTSASLTITGLLPEDEGDYYCQSYDGTLSALFGGGTKLTVLG

SEQ ID NO: 1301 - protein, 124 aa, Artificial Sequence
  Description of Artificial Sequence: Synthetic polypeptide
  MOD_RES (1)..(1): Any amino acid
  MOD_RES (26)..(35): This region may encompass one of the following sequences: "GFDIQDTYMH" or "DTYMH" or "KYDIN" or "GFEIQDTYMH" or "GFDPQDTYMH" or "GFDVQDTYMH" or "GFDIGDTYMH" or "GFDISDTYMH" or "GFDIVDTYMH" or "GFDIQDAYMH" or "GFDIQDSYMH" or "GFDIQDTFMH"
  MOD_RES (26)..(35): CONT. FROM ABOVE: or "GFDIQDTYIH" or "GFDLQDTYMH" or "GFDIQDTYLH" or "GFDIGDTFIH" or "GFDIGDTFMH" or "GFDIGDTYIH" or "GFDIQDTFIH" or "GFDIQDTFMH" or "GFDIQDTYIH" or "GFDISDTFIH" or "GFDISDTFMH" or "GFDISDTYIH" or "GFDISDTYMH" or "GFDIVDTFIH" or "GFDIVDTFMH"
  MOD_RES (26)..(35): CONT. FROM ABOVE: or "GFDIVDTYIH" or "GFDPGDTFIH" or "GFDPGDTFMH" or "GFDPGDTYIH" or "GFDPGDTYMH" or "GFDPQDTFIH" or "GFDPQDTFMH" or "GFDPQDTYIH" or "GFDPQDTYMH" or "GFDPSDTFIH" or "GFDPSDTFMH" or "GFDPSDTYIH" or "GFDPSDTYMH" or "GFDPVDTFIH" or "GFDPVDTFMH"
  MOD_RES (26)..(35): CONT. FROM ABOVE: or "GFDPVDTYIH" or "GFDPVDTYMH" or "GFDVGDTFIH" or "GFDVGDTFMH" or "GFDVGDTYIH" or "GFDVGDTYMH" or "GFDVQDTFIH" or "GFDVQDTFMH" or "GFDVQDTYIH" or "GFDVSDTFIH" or "GFDVSDTFMH" or "GFDVSDTYIH" or "GFDVSDTYMH" or "GFDVVDTFIH" or
  MOD_RES (26)..(35): CONT. FROM ABOVE: "GFEPSDTYMH" or "GFEPVDTFIH" or "GFDVVDTFMH" or "GFDVVDTYIH" or "GFDVVDTYMH" or "GFEIGDTFIH" or "GFEIGDTFMH" or "GFEIGDTYIH" or "GFEIGDTYMH" or "GFEIQDTFIH" or "GFEIQDTFMH" or "GFEIQDTYIH" or "GFEIQDTYMH" or "GFEISDTFIH" or "GFEISDTFMH"
  MOD_RES (26)..(35): CONT. FROM ABOVE: or "GFEISDTYIH" or "GFEISDTYMH" or "GFEIVDTFIH" or "GFEIVDTFMH" or "GFEIVDTYIH" or "GFEIVDTYMH" or "GFEPGDTFIH" or "GFEPGDTFMH" or "GFEPGDTYIH" or "GFEPGDTYMH" or "GFEPQDTFIH" or "GFEPQDTFMH" or "GFEPQDTYIH" or "GFEPQDTYMH" or "GFEPSDTFIH"
  MOD_RES (26)..(35): CONT. FROM ABOVE: or "GFEPSDTFMH" or "GFEPSDTYIH" or "GFEPVDTFMH" or "GFEPVDTYIH" or "GFEPVDTYMH" or "GFEVGDTFIH" or "GFEVGDTFMH" or "GFEVGDTYIH" or "GFEVGDTYMH" or "GFEVQDTFIH" or "GFEVQDTFMH" or "GFEVQDTYIH" or "GFEVQDTYMH" or "GFEVSDTFIH" or "GFEVSDTFMH"
  MOD_RES (26)..(35): CONT. FROM ABOVE: or "GFEVSDTYIH" or "GFEVSDTYMH" or "GFEVVDTFIH" or "GFEVVDTFMH" or "GFEVVDTYIH" or "GFEVVDTYMH" or "GFTFSSYW" or "GGSFTGFY" or "GYDFTYYGIS" or "SRSYYWG" or "TSNMGVV" or "LYGMN" or "NYGMN" or "GYTFTSSWMH" or "GYTFTSYDIN" or "SYFWS" or "GYYWN"
  MOD_RES (26)..(35): CONT. FROM ABOVE: or "GFTFSTYG" or "TYGMS"
  MOD_RES (38)..(38): Any amino acid
  MOD_RES (48)..(48): Any amino acid
  MOD_RES (50)..(66): This region may encompass one of the following sequences: "RIDPASGHTKYDPKFQV" or "RIEPASGHIKYDPKFQG" or "RIDPASGHIKYDPKFQG" or "RIEPASGHIKYDPKFQV" or "WIFPGDGRTDYNEKFKG" or "RLDPASGHTK" or "RIEPASGHTK" or "RIDPESGHTK" or "RIDPASGHTK"
  MOD_RES (50)..(66): CONT. FROM ABOVE: or "YDPKFQA" or "YDPKFQD" or "RIDPAGGHTK" or "RIDPASAHTK" or "RIDPASGHIK" or "RIDPASGHLK" or "RIDPASGHVK" or "YDPKFQV" or "IDPKFQV" or "LDPKFQV" or "MDPKFQV" or "SDPKFQV" or "TDPKFQV" or "VDPKFQV" or "YIPKFQV" or "YNPKFQV" or "YRPKFQV" or
  MOD_RES (50)..(66): CONT. FROM ABOVE: "YSPKFQV" or "YDPKFRV" or "YDPKFQE" or "YDPKFQG" or "YDPKFQH" or "YDPKFQK" or "YDPKFQL" or "YDPKFQM" or "YDPKFQN" or "YDPKFQP" or "YDPKFQR" or "YDPKFQS" or "YDPKFQT" or "RIEPASGHIKYDPKFQG" or "RIEPASGHIKYSPKFQG" or "RIEPASGHVKYSPKFQV"
  MOD_RES (50)..(66): CONT. FROM ABOVE: or "RIEPASGHVKYDPKFQT" or "RIDPASGHIKYDPKFQK" or "RIDPASGHVKIDPKFQV" or "RIDPASGHLKYDPKFQV" or "RIDPASGHLKYDPKFQR" or "RIDPASGHLKYDPKFQN" or "RIEPASGHLKYDPKFQE" or "PASGH" or "RIDPASGHTKYDPKFQV" or "RIDPASGHLKYDPKFQG" or "RIDPASGHTKYDPKFQG"
  MOD_RES (50)..(66): CONT. FROM ABOVE: or "RIDPASGHSKYDPKFQV" or "RIDPASGHYKYDPKFQV" or "IKEDGSEK" or "INHRGNT" or "WISTYNGNTHYARMLQG" or "SIYYNGRTYYNPSLKS" or "HILWDDREYSNPALKS" or "WINTYTGEPTYADDFKG" or "IHPNSGGT" or "YIYYSGNTKYNPSLKS" or "EINHAGNTNYNPSLKS" or
  MOD_RES (50)..(66): CONT. FROM ABOVE:"ISGTGRTT" or "WMNTYSGVTTYADDFKG"
  MOD_RES (68)..(68): Any amino acid
  MOD_RES (70)..(70): Any amino acid
  MOD_RES (72)..(72): Any amino acid
  MOD_RES (79)..(79): Any amino acid
  MOD_RES (81)..(81): Any amino acid
  MOD_RES (99)..(113): This region may encompass one of the following sequences: "SGGLPDV" or "ARSGGLPDV" or "SGGLPDW" or "ARSGGLPDW" or "YGPAMDY" or "LGGLPDV" or "SAGLPDV" or "SGGAPDV" or "SGGMPDV" or "SGGLPEV" or "SGGLPDK" or "SGGLPDM" or "SGGLPDQ" or "SGGLPDR" or
  MOD_RES (99)..(113): CONT. FROM ABOVE: "SGGLPDS" or "SGGLPDT" or "SGGLPDH" or "SGGLPDF" or "SGGSPDV" or "ARSGGLPDM" or "ARSGGLPDK" or "SGGLPD" or "ARSGGLPDF" or "ARSGGLPDL" or "SGGLPDE" or "SGGLPDI" or "SGGLPDK" or "SGGLPDL" or "SGGLPDM" or "SGGLPDQ" or "SGGLPDT" or
  MOD_RES (99)..(113): CONT. FROM ABOVE: "SGGLPDW" or "SGGLPDY" or "SGGMPDE" or "SGGMPDI" or "SGGMPDK" or "SGGMPDL" or "SGGMPDM" or "SGGMPDQ" or "SGGMPDT" or "SGGMPDV" or "SGGMPDW" or "SGGMPDY" or "AREDYDSYYKYGMDV" or "ASPFYDFWSGSDY" or "ENYYGSGAYRGGMDV" or
  MOD_RES (99)..(113): CONT. FROM ABOVE: "EDYGDYGAFDI" or "MSRNYYGSSYVMDY" or "DTAMDYAMAY" or "DYGKYGDYYAMDY" or "ARGDYYGYVSWFAY" or "EVPETAAFEY" or "ETGSYYGFDY" or "GYCRSTTCYFDY" or "TKERGDYYYGVFDY" or "EGYVFDDYYATDY"
  See specification as filed for detailed description of substitutions and preferred embodiments
XVQLVQSGAEVKKPGASVKVSCKASXXXXXXXXXXWVXQRPGQGLEWXGXXXXXXXXXXXXXXXXXRXTXTXDTSTSTXYXELSSLRSEDTAVYYCARXXXXXXXXXXXXXXXWGQGTTVTVSS

SEQ ID NO: 1302 - protein, 122 aa, Artificial Sequence
  Description of Artificial Sequence: Synthetic polypeptide
  MOD_RES (1)..(1): Any amino acid
  MOD_RES (26)..(35): This region may encompass one of the following sequences: "GFDIQDTYMH" or "DTYMH" or "KYDIN" or "GFEIQDTYMH" or "GFDPQDTYMH" or "GFDVQDTYMH" or "GFDIGDTYMH" or "GFDISDTYMH" or "GFDIVDTYMH" or "GFDIQDAYMH" or "GFDIQDSYMH" or "GFDIQDTFMH"
  MOD_RES (26)..(35): CONT. FROM ABOVE: or "GFDIQDTYIH" or "GFDLQDTYMH" or "GFDIQDTYLH" or "GFDIGDTFIH" or "GFDIGDTFMH" or "GFDIGDTYIH" or "GFDIQDTFIH" or "GFDIQDTFMH" or "GFDIQDTYIH" or "GFDISDTFIH" or "GFDISDTFMH" or "GFDISDTYIH" or "GFDISDTYMH" or "GFDIVDTFIH" or "GFDIVDTFMH"
  MOD_RES (26)..(35): CONT. FROM ABOVE: or "GFDIVDTYIH" or "GFDPGDTFIH" or "GFDPGDTFMH" or "GFDPGDTYIH" or "GFDPGDTYMH" or "GFDPQDTFIH" or "GFDPQDTFMH" or "GFDPQDTYIH" or "GFDPQDTYMH" or "GFDPSDTFIH" or "GFDPSDTFMH" or "GFDPSDTYIH" or "GFDPSDTYMH" or "GFDPVDTFIH" or "GFDPVDTFMH"
  MOD_RES (26)..(35): CONT. FROM ABOVE: or "GFDPVDTYIH" or "GFDPVDTYMH" or "GFDVGDTFIH" or "GFDVGDTFMH" or "GFDVGDTYIH" or "GFDVGDTYMH" or "GFDVQDTFIH" or "GFDVQDTFMH" or "GFDVQDTYIH" or "GFDVSDTFIH" or "GFDVSDTFMH" or "GFDVSDTYIH" or "GFDVSDTYMH" or "GFDVVDTFIH" or
  MOD_RES (26)..(35): CONT. FROM ABOVE: "GFEPSDTYMH" or "GFEPVDTFIH" or "GFDVVDTFMH" or "GFDVVDTYIH" or "GFDVVDTYMH" or "GFEIGDTFIH" or "GFEIGDTFMH" or "GFEIGDTYIH" or "GFEIGDTYMH" or "GFEIQDTFIH" or "GFEIQDTFMH" or "GFEIQDTYIH" or "GFEIQDTYMH" or "GFEISDTFIH" or "GFEISDTFMH"
  MOD_RES (26)..(35): CONT. FROM ABOVE: or "GFEISDTYIH" or "GFEISDTYMH" or "GFEIVDTFIH" or "GFEIVDTFMH" or "GFEIVDTYIH" or "GFEIVDTYMH" or "GFEPGDTFIH" or "GFEPGDTFMH" or "GFEPGDTYIH" or "GFEPGDTYMH" or "GFEPQDTFIH" or "GFEPQDTFMH" or "GFEPQDTYIH" or "GFEPQDTYMH" or "GFEPSDTFIH"
  MOD_RES (26)..(35): CONT. FROM ABOVE: or "GFEPSDTFMH" or "GFEPSDTYIH" or "GFEPVDTFMH" or "GFEPVDTYIH" or "GFEPVDTYMH" or "GFEVGDTFIH" or "GFEVGDTFMH" or "GFEVGDTYIH" or "GFEVGDTYMH" or "GFEVQDTFIH" or "GFEVQDTFMH" or "GFEVQDTYIH" or "GFEVQDTYMH" or "GFEVSDTFIH" or "GFEVSDTFMH"
  MOD_RES (26)..(35): CONT. FROM ABOVE: or "GFEVSDTYIH" or "GFEVSDTYMH" or "GFEVVDTFIH" or "GFEVVDTFMH" or "GFEVVDTYIH" or "GFEVVDTYMH" or "GFTFSSYW" or "GGSFTGFY" or "GYDFTYYGIS" or "SRSYYWG" or "TSNMGVV" or "LYGMN" or "NYGMN" or "GYTFTSSWMH" or "GYTFTSYDIN" or "SYFWS" or "GYYWN"
  MOD_RES (26)..(35): CONT. FROM ABOVE: or "GFTFSTYG" or "TYGMS"
  MOD_RES (38)..(38): Any amino acid
  MOD_RES (48)..(48): Any amino acid
  MOD_RES (50)..(66): This region may encompass one of the following sequences: "RIDPASGHTKYDPKFQV" or "RIEPASGHIKYDPKFQG" or "RIDPASGHIKYDPKFQG" or "RIEPASGHIKYDPKFQV" or "WIFPGDGRTDYNEKFKG" or "RLDPASGHTK" or "RIEPASGHTK" or "RIDPESGHTK" or "RIDPASGHTK"
  MOD_RES (50)..(66): CONT. FROM ABOVE: or "YDPKFQA" or "YDPKFQD" or "RIDPAGGHTK" or "RIDPASAHTK" or "RIDPASGHIK" or "RIDPASGHLK" or "RIDPASGHVK" or "YDPKFQV" or "IDPKFQV" or "LDPKFQV" or "MDPKFQV" or "SDPKFQV" or "TDPKFQV" or "VDPKFQV" or "YIPKFQV" or "YNPKFQV" or "YRPKFQV" or
  MOD_RES (50)..(66): CONT. FROM ABOVE: "YSPKFQV" or "YDPKFRV" or "YDPKFQE" or "YDPKFQG" or "YDPKFQH" or "YDPKFQK" or "YDPKFQL" or "YDPKFQM" or "YDPKFQN" or "YDPKFQP" or "YDPKFQR" or "YDPKFQS" or "YDPKFQT" or "RIEPASGHIKYDPKFQG" or "RIEPASGHIKYSPKFQG" or "RIEPASGHVKYSPKFQV"
  MOD_RES (50)..(66): CONT. FROM ABOVE: or "RIEPASGHVKYDPKFQT" or "RIDPASGHIKYDPKFQK" or "RIDPASGHVKIDPKFQV" or "RIDPASGHLKYDPKFQV" or "RIDPASGHLKYDPKFQR" or "RIDPASGHLKYDPKFQN" or "RIEPASGHLKYDPKFQE" or "PASGH" or "RIDPASGHTKYDPKFQV" or "RIDPASGHLKYDPKFQG" or "RIDPASGHTKYDPKFQG"
  MOD_RES (50)..(66): CONT. FROM ABOVE: or "RIDPASGHSKYDPKFQV" or "RIDPASGHYKYDPKFQV" or "IKEDGSEK" or "INHRGNT" or "WISTYNGNTHYARMLQG" or "SIYYNGRTYYNPSLKS" or "HILWDDREYSNPALKS" or "WINTYTGEPTYADDFKG" or "IHPNSGGT" or "YIYYSGNTKYNPSLKS" or "EINHAGNTNYNPSLKS" or
  MOD_RES (50)..(66): CONT. FROM ABOVE:"ISGTGRTT" or "WMNTYSGVTTYADDFKG"
  MOD_RES (68)..(68): Any amino acid
  MOD_RES (70)..(70): Any amino acid
  MOD_RES (72)..(72): Any amino acid
  MOD_RES (79)..(79): Any amino acid
  MOD_RES (81)..(81): Any amino acid
  MOD_RES (97)..(111): This region may encompass one of the following sequences: "SGGLPDV" or "ARSGGLPDV" or "SGGLPDW" or "ARSGGLPDW" or "YGPAMDY" or "LGGLPDV" or "SAGLPDV" or "SGGAPDV" or "SGGMPDV" or "SGGLPEV" or "SGGLPDK" or "SGGLPDM" or "SGGLPDQ" or "SGGLPDR" or
  MOD_RES (97)..(111): CONT. FROM ABOVE: "SGGLPDS" or "SGGLPDT" or "SGGLPDH" or "SGGLPDF" or "SGGSPDV" or "ARSGGLPDM" or "ARSGGLPDK" or "SGGLPD" or "ARSGGLPDF" or "ARSGGLPDL" or "SGGLPDE" or "SGGLPDI" or "SGGLPDK" or "SGGLPDL" or "SGGLPDM" or "SGGLPDQ" or "SGGLPDT" or
  MOD_RES (97)..(111): CONT. FROM ABOVE: "SGGLPDW" or "SGGLPDY" or "SGGMPDE" or "SGGMPDI" or "SGGMPDK" or "SGGMPDL" or "SGGMPDM" or "SGGMPDQ" or "SGGMPDT" or "SGGMPDV" or "SGGMPDW" or "SGGMPDY" or "AREDYDSYYKYGMDV" or "ASPFYDFWSGSDY" or "ENYYGSGAYRGGMDV" or
  MOD_RES (97)..(111): CONT. FROM ABOVE: "EDYGDYGAFDI" or "MSRNYYGSSYVMDY" or "DTAMDYAMAY" or "DYGKYGDYYAMDY" or "ARGDYYGYVSWFAY" or "EVPETAAFEY" or "ETGSYYGFDY" or "GYCRSTTCYFDY" or "TKERGDYYYGVFDY" or "EGYVFDDYYATDY"
  See specification as filed for detailed description of substitutions and preferred embodiments
XVQLVQSGAEVKKPGASVKVSCKASXXXXXXXXXXWVXQRPGQGLEWXGXXXXXXXXXXXXXXXXXRXTXTXDTSTSTXYXELSSLRSEDTAVYYCXXXXXXXXXXXXXXXWGQGTTVTVSS

SEQ ID NO: 1303 - protein, 6 aa, Artificial Sequence
  Description of Artificial Sequence: Synthetic 6xHis tag
HHHHHH

SEQ ID NO: 1304 - protein, 111 aa, Artificial Sequence
  Description of Artificial Sequence: Synthetic polypeptide
QSVLTQPPSVSGAPGQRVTISCTSSSSDIGAALGVHWYQQLPGTAPKLLIEGYYNRPSGVPDRFSGSKSGTSASLTITGLLPEDEGDYYCQSWDGTLSALFGGGTKLTVLG

SEQ ID NO: 1305 - protein, 111 aa, Artificial Sequence
  Description of Artificial Sequence: Synthetic polypeptide
QSVLTQPPSVSGAPGQRVTISCTSSSSDIGAGSGVHWYQQLPGTAPKLLIEGYYNRPSGVPDRFSGSKSGTSASLTITGLLPEDEGDYYCQSWDGTLSALFGGGTKLTVLG

SEQ ID NO: 1306 - protein, 111 aa, Artificial Sequence
  Description of Artificial Sequence: Synthetic polypeptide
QSVLTQPPSVSGAPGQRVTISCTSSSSDIGAGQGVHWYQQLPGTAPKLLIEGYYNRPSGVPDRFSGSKSGTSASLTITGLLPEDEGDYYCQSWDGTLSALFGGGTKLTVLG

SEQ ID NO: 1307 - protein, 111 aa, Artificial Sequence
  Description of Artificial Sequence: Synthetic polypeptide
QSVLTQPPSVSGAPGQRVTISCTSSSSDIGAGLGVLWYQQLPGTAPKLLIEGYYNRPSGVPDRFSGSKSGTSASLTITGLLPEDEGDYYCQSWDGTLSALFGGGTKLTVLG

SEQ ID NO: 1308 - protein, 111 aa, Artificial Sequence; identical to SEQ ID NO: 1299
  Description of Artificial Sequence: Synthetic polypeptide

SEQ ID NO: 1309 - protein, 111 aa, Artificial Sequence; identical to SEQ ID NO: 1305
  Description of Artificial Sequence: Synthetic polypeptide

SEQ ID NO: 1310 - protein, 111 aa, Artificial Sequence; identical to SEQ ID NO: 1306
  Description of Artificial Sequence: Synthetic polypeptide

SEQ ID NO: 1311 - protein, 111 aa, Artificial Sequence; identical to SEQ ID NO: 1307
  Description of Artificial Sequence: Synthetic polypeptide

SEQ ID NO: 1312 - protein, 111 aa, Artificial Sequence
  Description of Artificial Sequence: Synthetic polypeptide
QSVLTQPPSVSGAPGQRVTISCTSSSSDIGAGLGVHWYQQLPGTAPKLLIEGYYNRPSGVPDRFSGSKSGTSASLTITGLLPEDEGDYYCQSFDGTLSALFGGGTKLTVLG

SEQ ID NO: 1313 - protein, 107 aa, Artificial Sequence
  Description of Artificial Sequence: Synthetic polypeptide
DIQMTQSPSSLSASVGDRVTITCRASQSINNYLNWYQQRPGKAPKLLIYAASSLQSGVPSRFSGSGSGTDFTLTISSLQPGDFATYYCQQSYSTPRTFGQGTKLEIK

SEQ ID NO: 1314 - protein, 107 aa, Artificial Sequence
  Description of Artificial Sequence: Synthetic polypeptide
EIVLTQSPGTLSLSPGERATLSCRASQSVRSSYLAWYQQKPGQAPRLLIYGASSRATGIPDRFSGSGSGTDFTLTISRLEPEDFAVYYCQQYGSSPTFGQGTRLEIK

SEQ ID NO: 1315 - protein, 106 aa, Artificial Sequence
  Description of Artificial Sequence: Synthetic polypeptide
DIQMTQSPSTLSASVGDRVTITCRASQTISSWLAWYQQTPEKAPKLLIYAASNLQSGVPSRFSGSGSGTEFTLTISSLQPDDFATYYCQQYHRSWTFGQGTKVEIT

SEQ ID NO: 1316 - protein, 112 aa, Artificial Sequence
  Description of Artificial Sequence: Synthetic polypeptide
DVLMTQTPLSLPVSLGDQASISCRSSQNIVHSDGNTYLEWYLQKPGQSPKLLIYKVSNRFSGVPDRFSGSGSGTDFTLKISRVEAEDLGIYYCFQGSHVPLTFGAGTKLELK

SEQ ID NO: 1317 - protein, 14 aa, Artificial Sequence
  Description of Artificial Sequence: Synthetic peptide
WVRQAPGQGLEWMG

SEQ ID NO: 1318 - protein, 30 aa, Artificial Sequence
  Description of Artificial Sequence: Synthetic polypeptide
RVTMTRDTSTSTVYMELSSLRSEDTAVYYC

SEQ ID NO: 1319 - protein, 30 aa, Artificial Sequence
  Description of Artificial Sequence: Synthetic polypeptide
RATITTDTSASTAYLQLSSLRSEDTAVYYC

SEQ ID NO: 1320 - protein, 30 aa, Artificial Sequence
  Description of Artificial Sequence: Synthetic polypeptide
RVTITRDTSASTVYMELSSLRSEDTAVYYC

SEQ ID NO: 1321 - protein, 30 aa, Artificial Sequence
  Description of Artificial Sequence: Synthetic polypeptide
RVTITRDTSASTAYMELSSLRSEDTAVYYC

SEQ ID NO: 1322 - protein, 32 aa, Artificial Sequence
  Description of Artificial Sequence: Synthetic polypeptide
RVTMTRDTSTSTVYMELSSLRSEDTAVYYCSR

SEQ ID NO: 1323 - protein, 32 aa, Artificial Sequence
  Description of Artificial Sequence: Synthetic polypeptide
RVTMTRDTSTSTVYMELSSLRSEDTAVYYCAR

SEQ ID NO: 1324 - protein, 15 aa, Artificial Sequence
  Description of Artificial Sequence: Synthetic peptide
WYQQKPGQAPRLLIY

SEQ ID NO: 1325 - protein, 32 aa, Artificial Sequence
  Description of Artificial Sequence: Synthetic polypeptide
GVPDRFSGSGSGTDYTLTISRLEPEDFAVYYC

SEQ ID NO: 1326-2000 - skipped (675 entries)

SEQ ID NO: 2001 - DNA, 101 bp, Homo sapiens
ggtaactagaccaggcagtgccctccttgtcagtctgcctgtctgcctgghtccctctcagagtttgtgtcttcactcggttcatcatccccagccccagc

SEQ ID NO: 2002 - DNA, 101 bp, Homo sapiens
tgttaagatacgaactacccatctgaacgattataattggaagactttgartgatgtgattatttgccactttgccatgttgtatgtccagtgtgtgtagc

SEQ ID NO: 2003 - DNA, 51 bp, Homo sapiens
acacaagcatgcacacaagtagctggtaatcacattgtccttaatttgcat

SEQ ID NO: 2004 - DNA, 101 bp, Homo sapiens
cacacacacacacacacacacacacacacaagcatgcacacaagtagctgrtaatcacattgtccttaatttgcatccaaagagggtcagctgattctgag

SEQ ID NO: 2005 - DNA, 101 bp, Homo sapiens
ttacatgctggacatgggcaagataggaactcaagttacttccaggtctcygtaagtttaggactgtgaagagggcatcctaatagtcaaaaacataagtg

SEQ ID NO: 2006 - DNA, 101 bp, Homo sapiens
tcctaccagcaatagcagacattcctattttttccatattcttgccagtgwtaagacttatcatatgtctttttaactttacctgctctaggtgatgtgtg

SEQ ID NO: 2007 - DNA, 101 bp, Homo sapiens
tctctttcctttggcctagtttgagtgcccagcaggtgtttcaagtcactsattacgtatctactctgcgaaagttgtttgtgcagcctgtttatcctctc

SEQ ID NO: 2008 - DNA, 101 bp, Homo sapiens
tgaaaaacaggtgggagagagtgaagagcatgatgatgaattcattttttwaaaaatctgtgcactttgcattttaatttacaataaacatacagtattac

SEQ ID NO: 2009 - DNA, 101 bp, Homo sapiens
gcttggaaattagacaaaagtagagaggtcaggtgggctaattccagttahgatagaaaagtgagttgaatggatagaaagttcaggtggaaaagtgtaat

SEQ ID NO: 2010 - DNA, 101 bp, Homo sapiens
tcatttggttacaaggaagtattgaaagttgagatgagaagaataaattayggaatgcagctccctgtctaatatttgcattattatgtttcagacataca

SEQ ID NO: 2011 - DNA, 101 bp, Homo sapiens
ttttttctagtgtctgaaatgtggtctcaaagggaggtgtagagaggagaktaacaatgccccgttggttgcagttagaggggcagacaagtaagaaggtg

SEQ ID NO: 2012 - DNA, 101 bp, Homo sapiens
tttcctgatcctaagcatcgaatatggttatgtaagtaacatcaggagaarttggatgaagaatattttggaactctctgtactaatttttaggctgttct

SEQ ID NO: 2013 - DNA, 101 bp, Homo sapiens
cctgttttacagagtagttgaccaaagaagagccttagggaataaatgaavtagttcaaaaggaagtagattttaataaaaacctaaatgagtagcatcag

SEQ ID NO: 2014 - DNA, 101 bp, Homo sapiens
atgaggcacaactttagtccttccccaaataccttgtctgatctgccaacwgagacaccgcagagggaaagtgatagggtggccagttctggggcctcact

SEQ ID NO: 2015 - DNA, 101 bp, Homo sapiens
aaagaagaatagctctctctcctgtgagagaaggggcacgcaagtgggaaytccagcccatggcagagtgcactggattttatacacaggctgaaagaggt

SEQ ID NO: 2016 - DNA, 101 bp, Homo sapiens
aaaacaggacctggtcagagcccgcaggagacgtgggacaggaggaattakggggtgggtgagctcctccacactcccacccccaccacttacacgcagcc

SEQ ID NO: 2017 - DNA, 101 bp, Homo sapiens
cttataagactctccatgttctagcctccccagctacctcctgaatactcvtgtgttgtcactcccttctctctcatactccatttcatcacacactccaa

SEQ ID NO: 2018 - DNA, 101 bp, Homo sapiens
tgtcttccctgacagagaccatagaaggagtcgatgctgaggatgggcacdgcccaggtttgaagacagagaagggaggcagggcagggaactgggggaaa

SEQ ID NO: 2019 - DNA, 101 bp, Homo sapiens
gcggcgcctccccaatgcagacacggcccttggagcctgagaccctgagadccccgcccgggacctgggacttcgtcctgatccctcttctcctacaccaa

SEQ ID NO: 2020 - DNA, 101 bp, Homo sapiens
gctctgtttttaggtgcatacacacttaagattgttttgtgtctttggagmaataaccccttatcattaaataatatccctctttatccctggtaatattc

SEQ ID NO: 2021 - DNA, 101 bp, Homo sapiens
tgttcattttaattgatgctgaaaaaagcatttgataaaatttaacatcahttcatgttaaaaattctcaaaaactggggatataaagaacatacttcaac

SEQ ID NO: 2022 - DNA, 101 bp, Homo sapiens
tacactccaatgagtggtgtcagccaaagtgtttcatagtacagtgacagbaggatctgtccttgtttgagtgtaccagcagcagtggtagttgaagctgc

SEQ ID NO: 2023 - DNA, 101 bp, Homo sapiens
gaagctgcactcacagagatatccgggcatgtctcacactggaaatagggkacccttccaaatattgggagaaagaaggcaaagaaaatcataccgatata

SEQ ID NO: 2024 - DNA, 101 bp, Homo sapiens
ctcgtctccccgcgcctatgtcgcacgctggccagcgcctcctggctaagyggcctcaccaactcggttgcgcaaaccgcgctcctggctgagcggccgct

SEQ ID NO: 2025 - DNA, 101 bp, Homo sapiens
acatggtcttaatcagtttgaggaagaacttttccctttgttttgttttgkttttgctgaaacctgtttattgttgattgttttatcttttaatttcaaat

SEQ ID NO: 2026 - DNA, 101 bp, Homo sapiens
tccccctttcctggattcttctgcttttctggggagataaactaaggactbctttcattttagctgctaaagtcttttcttggtagcaactgggagcagat

SEQ ID NO: 2027 - DNA, 101 bp, Homo sapiens
  modified_base (51)..(51): a, c, t, g, unknown or other
cttaagcaacactctgagaacagtgtcctgagacattcaggtcattgctcngatgatggcactgttttgaggggtaagaaagatatagctctggctgcttt

SEQ ID NO: 2028 - DNA, 101 bp, Homo sapiens
  modified_base (51)..(51): a, c, t, g, unknown or other
gcccgtctcaacctcccaaagtgctgggattacaggcgtgatccaccgcgnccggccttaacttttaatgtagcctggattgtatttgtctttataccaat

SEQ ID NO: 2029 - DNA, 101 bp, Homo sapiens
aagggaaactgatctaccctctctgagggcctctttagaagataacattcrtgaagaggagctagtagtgttctaattctgaaagtcactccgggtctgta

SEQ ID NO: 2030 - DNA, 101 bp, Homo sapiens
cctgccattgtatggagtttgctaacacccacaccatacactacagacgchagaaacaccaaaaaggcacataattacctgacaaaaggttaaagcatctc

SEQ ID NO: 2031 - DNA, 101 bp, Homo sapiens
cacccatcttctgcgtcgctcacgctgggagctgtagaccggagctgttcvtattcggccatcttggctcccggagcctgcgtttttctttaatggaaagg

SEQ ID NO: 2032-20099 - skipped (18068 entries)

SEQ ID NO: 20100 - protein, 5 aa, Artificial Sequence
  Description of Artificial Sequence: Synthetic peptide
SYIWS

SEQ ID NO: 20101 - protein, 16 aa, Artificial Sequence
  Description of Artificial Sequence: Synthetic peptide
RIYASGNTNYNPSLKS

SEQ ID NO: 20102 - protein, 16 aa, Artificial Sequence
  Description of Artificial Sequence: Synthetic peptide
DYRVAGTYYYYYGLDV

SEQ ID NO: 20103 - protein, 14 aa, Artificial Sequence
  Description of Artificial Sequence: Synthetic peptide
TGTSSDVGVYDYVS

SEQ ID NO: 20104 - protein, 7 aa, Artificial Sequence
  Description of Artificial Sequence: Synthetic peptide
EVSNRPS

SEQ ID NO: 20105 - protein, 10 aa, Artificial Sequence
  Description of Artificial Sequence: Synthetic peptide
SSYTSRSTWV

SEQ ID NO: 20106 - protein, 5 aa, Artificial Sequence
  Description of Artificial Sequence: Synthetic peptide
SYYWT

SEQ ID NO: 20107 - protein, 16 aa, Artificial Sequence
  Description of Artificial Sequence: Synthetic peptide
RIYTSGITNYNPSLKS

SEQ ID NO: 20108 - protein, 16 aa, Artificial Sequence
  Description of Artificial Sequence: Synthetic peptide
ERVVGASRYYYYGVDV

SEQ ID NO: 20109 - protein, 14 aa, Artificial Sequence
  Description of Artificial Sequence: Synthetic peptide
TGTSSDVGLYNYVS

SEQ ID NO: 20110 - protein, 7 aa, Artificial Sequence
  Description of Artificial Sequence: Synthetic peptide
EVNNRPS

SEQ ID NO: 20111 - protein, 10 aa, Artificial Sequence
  Description of Artificial Sequence: Synthetic peptide
SSYTSSSTWV

SEQ ID NO: 20112 - protein, 5 aa, Artificial Sequence
  Description of Artificial Sequence: Synthetic peptide
SYYWT

SEQ ID NO: 20113 - protein, 16 aa, Artificial Sequence
  Description of Artificial Sequence: Synthetic peptide
RIYTSGITNYNPSLKS

SEQ ID NO: 20114 - protein, 16 aa, Artificial Sequence
  Description of Artificial Sequence: Synthetic peptide
ERVVGASRYYYYGVDV

SEQ ID NO: 20115 - protein, 14 aa, Artificial Sequence
  Description of Artificial Sequence: Synthetic peptide
TGTSSDIGLYDYVS

SEQ ID NO: 20116 - protein, 7 aa, Artificial Sequence
  Description of Artificial Sequence: Synthetic peptide
EVNNRPS

SEQ ID NO: 20117 - protein, 10 aa, Artificial Sequence
  Description of Artificial Sequence: Synthetic peptide
SSYTSSSTWV

SEQ ID NO: 20118 - protein, 5 aa, Artificial Sequence
  Description of Artificial Sequence: Synthetic peptide
SYSWS

SEQ ID NO: 20119 - protein, 16 aa, Artificial Sequence
  Description of Artificial Sequence: Synthetic peptide
RTSTSGRNNYNPSLKS

SEQ ID NO: 20120 - protein, 16 aa, Artificial Sequence
  Description of Artificial Sequence: Synthetic peptide
DFTIAARRYYYYGMDV

SEQ ID NO: 20121 - protein, 14 aa, Artificial Sequence
  Description of Artificial Sequence: Synthetic peptide
TGTSSDIGLYNYVS

SEQ ID NO: 20122 - protein, 7 aa, Artificial Sequence
  Description of Artificial Sequence: Synthetic peptide
EVINRPS

SEQ ID NO: 20123 - protein, 10 aa, Artificial Sequence
  Description of Artificial Sequence: Synthetic peptide
SSYTSSSTWV

SEQ ID NO: 20124 - protein, 5 aa, Artificial Sequence
  Description of Artificial Sequence: Synthetic peptide
NNYWS

SEQ ID NO: 20125 - protein, 16 aa, Artificial Sequence
  Description of Artificial Sequence: Synthetic peptide
RVYSSGLTNYKPSLKS

SEQ ID NO: 20126 - protein, 16 aa, Artificial Sequence
  Description of Artificial Sequence: Synthetic peptide
ERATVTTRYHYDGMDV

SEQ ID NO: 20127 - protein, 14 aa, Artificial Sequence
  Description of Artificial Sequence: Synthetic peptide
TGSSSDIGTYNYVS

SEQ ID NO: 20128 - protein, 7 aa, Artificial Sequence
  Description of Artificial Sequence: Synthetic peptide
EVNNRPS

SEQ ID NO: 20129 - protein, 10 aa, Artificial Sequence
  Description of Artificial Sequence: Synthetic peptide
SSYSSSSTWV

SEQ ID NO: 20130 - protein, 5 aa, Artificial Sequence
  Description of Artificial Sequence: Synthetic peptide
SYYWS

SEQ ID NO: 20131 - protein, 16 aa, Artificial Sequence
  Description of Artificial Sequence: Synthetic peptide
RIFASGSTNYNPSLRS

SEQ ID NO: 20132 - protein, 16 aa, Artificial Sequence
  Description of Artificial Sequence: Synthetic peptide
ERVGVQDYYHYSGMDV

SEQ ID NO: 20133 - protein, 14 aa, Artificial Sequence
  Description of Artificial Sequence: Synthetic peptide
TGTSSDVGLYNYVS

SEQ ID NO: 20134 - protein, 7 aa, Artificial Sequence
  Description of Artificial Sequence: Synthetic peptide
EVSKRPS

SEQ ID NO: 20135 - protein, 10 aa, Artificial Sequence
  Description of Artificial Sequence: Synthetic peptide
SSYTSSSTWV

SEQ ID NO: 20136 - protein, 124 aa, Artificial Sequence
  Description of Artificial Sequence: Synthetic polypeptide
QVQLQESGPGLVKPSETLSLTCTVSGGSISSYYWTWIRQPAGKGLEWIGRIYTSGITNYNPSLKSRVTMSVDTSKNQFSLKLSSVTAADTAVYYCARERVVGASRYYYYGVDVWGQGTTVTVSS

SEQ ID NO: 20137 - protein, 110 aa, Artificial Sequence
  Description of Artificial Sequence: Synthetic polypeptide
QSALTQPASVSGSPGQSITISCTGTSSDVGLYNYVSWYQQHPDKAPKLMIFEVNNRPSGVSNRFSGSNSGNTASLTISGLQAEDEADYYCSSYTSSSTWVFGGGTKLTVL

SEQ ID NO: 20138 - protein, 124 aa, Artificial Sequence; identical to SEQ ID NO: 20136
  Description of Artificial Sequence: Synthetic polypeptide

SEQ ID NO: 20139 - protein, 110 aa, Artificial Sequence
  Description of Artificial Sequence: Synthetic polypeptide
QSALTQPASVSGSPGQSITISCTGTSSDIGLYDYVSWYQQHPDRAPKLIIFEVNNRPSGVSYRFSGSNSGNTASLTISGLQAEDEADYYCSSYTSSSTWVFGGGTKLTVL

SEQ ID NO: 20140 - protein, 124 aa, Artificial Sequence
  Description of Artificial Sequence: Synthetic polypeptide
QVQLQESGPGLVKPSETLSLTCTVSGGSISSYSWSWIRQPAGKGLEWIGRTSTSGRNNYNPSLKSRVTMSVDTSKNQFSLKLNSVTAADTAVYYCARDFTIAARRYYYYGMDVWGQGTTVTVSS

SEQ ID NO: 20141 - protein, 110 aa, Artificial Sequence
  Description of Artificial Sequence: Synthetic polypeptide
QSALTQPASVSGSPGQSITISCTGTSSDIGLYNYVSWYQQHPGKAPKLIIYEVINRPSGVSNRFSGSESGNTASLTISGLQAEDEANYYCSSYTSSSTWVFGGGTKLTVL

SEQ ID NO: 20142 - protein, 124 aa, Artificial Sequence
  Description of Artificial Sequence: Synthetic polypeptide
QVQLQESGPRLVKPSETLSLTCTVSGGSITNNYWSWIRQPAGKGLEWIGRVYSSGLTNYKPSLKSRVTMSVDTSKNQFSLRLNSVTAADTAVYYCARERATVTTRYHYDGMDVWGQGTSVTVSS

SEQ ID NO: 20143 - protein, 110 aa, Artificial Sequence
  Description of Artificial Sequence: Synthetic polypeptide
QSALTQPASVSGSPGQSITISCTGSSSDIGTYNYVSWYQQYPGKAPELMIYEVNNRPSGVSDRFSGSTSGNTASLTISGLQANDEADYYCSSYSSSSTWVFGGGTKLTVL

SEQ ID NO: 20144 - protein, 124 aa, Artificial Sequence
  Description of Artificial Sequence: Synthetic polypeptide
QVQLQESGPGLVKPSETLSLTCTVSGGSISSYYWSWIRQPAGKGLEWIGRIFASGSTNYNPSLRSRVTMSRDTSKNQFSLKLSSVTAADTAVYYCAKERVGVQDYYHYSGMDVWGQGTTVTVSS

SEQ ID NO: 20145 - protein, 110 aa, Artificial Sequence
  Description of Artificial Sequence: Synthetic polypeptide
QSALTQPASVSGSPGQSITISCTGTSSDVGLYNYVSWYQQQPGKAPKLMIYEVSKRPSGVSNRFSGSTSGNTASLTISGLQADDEADYSCSSYTSSSTWVFGGGTKLTVL

SEQ ID NO: 20146 - protein, 124 aa, Artificial Sequence
  Description of Artificial Sequence: Synthetic polypeptide
QVQLQESGPGLVKPSETLSLTCTVSGGSISSYIWSWIRQPAGKGLEWIGRIYASGNTNYNPSLKSRVTISVDTSKNQFSLKLSSMTAADTAVYYCARDYRVAGTYYYYYGLDVWGQGTTVTVSS

SEQ ID NO: 20147 - protein, 124 aa, Artificial Sequence
  Description of Artificial Sequence: Synthetic polypeptide
QVQLQESGPGLVKPSETLSLTCTVSGGSISSYIWSWIRQPAGKGLEWIGRIYASGNTNYNPSLKSRVTMSVDTSKNQFSLKLSSMTAADTAVYYCARDYRVAGTYYYYYGLDVWGQGTTVTVSS

SEQ ID NO: 20148 - protein, 124 aa, Artificial Sequence
  Description of Artificial Sequence: Synthetic polypeptide
QVQLQESGPGLVKPSETLSLTCTVSGGSISSYIWSWIRQPAGKGLEWIGRIYASGNTNYNPSLKSRVTMSVDTSKNQFSLKLSSVTAADTAVYYCARDYRVAGTYYYYYGLDVWGQGTTVTVSS

SEQ ID NO: 20149 - protein, 124 aa, Artificial Sequence
  Description of Artificial Sequence: Synthetic polypeptide
QVQLQESGPGLVKPSETLSLTCTVSGGSISSYIWSWIRQPAGKGLEWIGRIYASGQTNYNPSLKSRVTMSVDTSKNQFSLKLSSMTAADTAVYYCARDYRVAGTYYYYYGLDVWGQGTTVTVSS

SEQ ID NO: 20150 - protein, 124 aa, Artificial Sequence
  Description of Artificial Sequence: Synthetic polypeptide
QVQLQESGPGLVKPSETLSLTCTVSGGSISSYIWSWIRQPAGKGLEWIGRIYASGQTNYNPSLKSRVTISVDTSKNQFSLKLSSVTAADTAVYYCARDYRVAGTYYYYYGLDVWGQGTTVTVSS

SEQ ID NO: 20151 - protein, 124 aa, Artificial Sequence
  Description of Artificial Sequence: Synthetic polypeptide
QVQLQESGPGLVKPSETLSLTCTVSGGSISSYIWSWIRQPAGKGLEWIGRIYASGNTNYNPSLKSRVTISVDTSKNQFSLKLSSVTAADTAVYYCARDYRVAGTYYYYYGLDVWGQGTTVTVSS

SEQ ID NO: 20152 - protein, 124 aa, Artificial Sequence
  Description of Artificial Sequence: Synthetic polypeptide
QVQLQESGPGLVKPSETLSLTCTVSGGSISSYIWSWIRQPAGKGLEWIGRIYASGQTNYNPSLKSRVTISVDTSKNQFSLKLSSMTAADTAVYYCARDYRVAGTYYYYYGLDVWGQGTTVTVSS

SEQ ID NO: 20153 - protein, 124 aa, Artificial Sequence
  Description of Artificial Sequence: Synthetic polypeptide
QVQLQESGPGLVKPSETLSLTCTVSGGSISSYIWSWIRQPAGKGLEWIGRIYASGQTNYNPSLKSRVTMSVDTSKNQFSLKLSSVTAADTAVYYCARDYRVAGTYYYYYGLDVWGQGTTVTVSS

SEQ ID NO: 20154 - protein, 110 aa, Artificial Sequence
  Description of Artificial Sequence: Synthetic polypeptide
QSALTQPASVSGSPGQSITISCTGTSSDVGVYDYVSWYQQHPGKAPKLMIYEVSNRPSGVSNRFSGSKSGNTASLTISGLQTEDEADYYCSSYTSRSTWVFGGGTKLTVL
